United States Patent Application Publication US 2024/0390433 A1 - sequence listing, part 4

SEQ ID NO: 4 - DNA, 1000000 bp, Bacillus subtilis
  source 1..1000000: mol_type = genomic DNA
aacaagcatcatcaaatagacttatccgtgttctagacctaaaacgtgcatcatgttgccaagaaaatgttgcatttggctcaaaagtaaaatcgctttttttgccaccaagctgccagacaatctttcctgttgttttatcaaccaaataaatcgcccacatgttacgcatgcttattagaagagtattgttcggcccttcctcaactgaattcacgtgaaaacagtcccaaatattgttagcgcttgtggcggatgacgcaggtaacatcgagtcatccggattaacatgagcaagcacatcccagaagaaaagaagctctcctgtctcaagatctacttcttgaatggaataattgtcaaagtacccatctgccggacctccatacattgtgagatccgctggcacttgtttcacagcagtaaacaaagccgtatcttgctttgtaatcgtaaactcgtgaacatcagaggtaaatccttttttggcggtgagtttcttaatcactttataattctgattgatgatttgataaaaagctccaggttccggatcccccgccgggagattaggatcattagactgagttccagatattgttccttgccacatggtaagaacgggttcccctttgtaggattgtaccctaaagtccgtattttgtgtaaatctactatcaagaggtctaaaccatactgggttaccagcttgatctatgatcaatgcacctgtttgcccaatcatagttgcgccgaacacagtatagggtgcaacgaatattaagccgggtgctgtccctggcttgttgacatttatagaaaccttcataggatgcagggtaggagccgaaacaaagttccattcttgtgagcttgaatgatttgcggatgccttatcaccgcatcccccataaatggcacgcataattccgtatcgggacagaatcccgggttttcatcacataatgatttggcaaaggcaggattttgttggctgaggtttttaaaataacagacaatctcatgattgcgaacaggtaaactgttcagttgaaaagagagcgttaccttcttgtctacatgttgatagagtaatccttgctttgtaaatggaggcggatatgcttgatccggcaaggtgggaataatgtcatggatattgaaaatacgaatactattctttaccgtttggttgaaccgggacgcaaagacagggtcagcgactcgagggctgccataagtatacacaaaaggatttttaaatcgggtattcaccgcaatatcaaaagcggctaacacggctaaagctcctcctaaactatggcctgcgactaataatctttttgctgcataaagcttggttaattccccgatcagctcatttcttgtcgattgataaagacatgtaaatccacgatgggtttttcctgcatttctgacaaacggatatggtacttgatataagtcttggtccgactcattgtccttaaatgttcgggttcctctaaaaattacaatgatctgatcttgtgactcggcaataaaaccaaatacttcagcttccggatcctcaacaccagcaagagctcgtatggtatatcgaaggctatatccttttggcaagacaagcggttccttttcaaagagttgatatgactgatagatcatggccgatagcaatatcgaatcctcacggttaaacatataatataagcttgagtgattcatccgagcagctcctttcttttattcctagcatgttcctcgaaacggagtacacatgtcaggatcgggacaaaaccctggatttttatcgcataatatttcggagaaatcaggattcattttactaaggtatttaaaataacaagcaatcgcatcattgcgcggcgtattattcaattgaagagagattggatactttgtttttacatggtgatagtataatccttcctccgtaaaaggtggtggatacttttttgctgggaaagttggaaacgagtcatgaatatttacaattcgtatactatttttcaccactttgttaaattgggaagcaaagacagggtcaccgatacgcggactgccatacgtatacaagaaaggatgattaaacccagtgttcgcagcaatatctaaagcagctaacgttgccaaagctcctccgtagttgtgcccggtaacaaacagcttttttgacttagaaagtttatttatttgtctgattaaattgtttcttgttgattgataaagacatgtgaatccacgagacgttttcccgccatttttaacatagggatagggaacttgaaatatgtcataggatgctaaaagatccttaggatatgctgcgtatcctctaaacgctataacgatttgatcttgtgactcggcaataaaaccgaatacctcttccataggattctctacgtcagcaaaagcacgaatagtatatcgaagtttaaagccttctggtaaggtaagtttcccttctaaaaagaatggatatgtctgatagctcattgctgcaagaaatattgcggctttgctattaaaaatattgtttttatctaaagaaaccatatatacgcaatccctttcttaatataggtaaatatgatgttaatggtacaatatgaatgaaaacccggaattgctaatgatggtgatatgaacggggatatgggtaaagaaacgtggaagttacttaatgacggaataaaagaaaatgtaaaaagacaaaaagcgccctgttgcaggggcgctttttgattaagatgcatattgaggagatgtatcctcctttactgctttttcttcaggtatatgaatgcatttcgtcatgattgcactcgcaacgtaaaggaccgcaaagatccagacgacgccttgcgcaccgacgagaccgatgaacaaccaagcaagcgcgggaccgacaaacgctgataaacctgcagccaaattcaatacagacatggctgcccctttgtcttttccggccaccgtcggcacaattgccccgatcggcacatagcctgccagcaaacctccccaaataaagccgatcacactgacaaccgctacacttccgccggagaaaaccggtgcataatataataagacagtgaaaatgccgcagccgactccgccgaaccaaataacagtatttttccagccgaatttatcgccgacaataccaaagataagattaaacacaatgttccccagaaaaatcgttccccaaatttgcagccacacattggttgaaattccatgctgggccatgtgcatcggcaaaaagactggaaaaccatatgtaccaatgctgttgatgattctgatgattccgcctgtaaacacgcgcggatttgtaaataaaatcgtaaccccttttaaaagctcctcggctgtttctgatctttttcttttcttcttttcaaaacggtctttattgataaacaatgcaaagaatgcaccgagacatacccagaaaatagagctccaaagcgtattcaaataaccgaacgctttgatcgcgtagcttgagtaccaagcgccgaacacaaacatgccgaggcaatatgctatccaaaaccagccgacagcagtgctcagtttgctttgcggtgttctgtaaatgacccatgtcaagaaagaataagcaaaaagcgggtaacctaacccttttacgaagtaagtcacatacatcactggcaggttcagctgttcaaatccaaatacgataaaagcagctgtaccgatcacataaaacaacagccccataaacatcgttcgttttgcgccaaatgcttcgagacatacacccgaaaaccaggaagctatggcaagcgcaattccgtatatactaaaaatagaagcggactgctgaacggtgagcccgttttcgatcaaaaaaggactgagccagccttgttcaaggccatctcccatcataaacaaaacaacccctaaaaatccccaggcaagccgcttcggtattcctattttatccaacatatctgtctcctccttagatgcttatatccattaccgtattaccttattaaagttgaaaattaaatgattcctcaaaacagcaaaaatgctgccgccttaaatcaatactttgctttctgaacctgaaaaaaagcgctgtgtttgcttccatttctcatataaagccaattctgtctgacagtccttcggttcaatcacccggacatttgctgacatctcctccgttaattgaaaggtttcattgcaaatgactgcagcaccaacgacagatgcctgatgatatccctcttggacatagacctttttttgaagaagatccgcgatatattgagtgagcactttgctttggaatccccctccgcacacccaaacatagtcacgttcaaacggagtaacctctgttaaaatgtcaaagttccatttgattgaaaatgcgatttcttctagcgctgcacgtacaaaatgtgccctctttaaatgtgctgacagcggggcatcaaaaagaaaaccgcctctcgttaatgcattcttttcagccgataaataagagccgagagccgctacacatgcatagtcttcttttgcaagtgcagaaatctcctcctccattacttcgtacgtttcattcggataaaaaatctgttttaatttttgataattcaagccggtaattcccggattcgtttccacaagccaatgcccttgatctgtatgacagttcagccaggctttatgttttgtgtcgccatgatccgcagtaattttggttattggcgttgttgtccctgatacaatgacaatgtcctcaagtccagctccggtgcttttgacagccagctgtgtatccccgccccctgctataaccttagcatttattgaaaggcctaattcggatgcatattcatttgctatcgttccaattgctgttcccgctcttacaagaggcggaaggatagatggagaaaagccgaaaatgtcgcacatctcttctgaccaagtgttttgcttcacatcaaatagcagggtttctgttgcctgtgatggttcatatgttaatattccgctcagttggtacgtcacccaatcactgatgcttgtaaagcttgcagtcttttcccataaagagggctggcgctgttttaatccataaagcttgagcgcagaaaaaagtgcagttggcaggcggcctgtgcggctgtatatctcttcccgatcgggaatgcccgcctcccactctcggccgcgattatcgatgttcggcagcccgagaaaaggattgccgttttgatcaatcaaaacaatcccctgtctttggctcgtcgatgtcaaaccaatgatgtcaatatcacgcgaacgggatagcgcacgttttgccaaattcatcacctgcttccacagcacctgaggagaaaaataacggctgtccgggtaaagcgtctctgtggaatactcgatgtcctcccgttcaactgttagaacactgccagttacactcacgaccgctaccctcgcattgcctgtgccaatatcaaaaacgagatagcctttttgttttttcattctcttagcctcctttcttatacccctgttttcagttcgtccttgttatacattgtcggaatattaagagttttttcacccttccactttttgagggctttattcagtatcgtcacgtgatgatcctccacttcaaatgttgctccagcgagatgcggtgttgccagaacattaggcaatgaaatcaattcataatctgattcctctggaggttcatgataaaaaacgtctaatatcgcacctctgattttatgttcttttaatacagataaaagatcttcacggtttacaacaactgctcttgaagtattgacgaaaatcgcactctgtttcatcagatcaaaatgcttccgatcaataagtccaagtgtttcctcagtacgaggcagatgtacagaaacgatatcactgtctgaaaacaccgttttaagagatactttttcatacagcggatgatcgtcttgaatgtatggatcgtaatactttattttacagtcaaacgcagtcagcagttttgcaatcctttggccaaccgccccgaacccaatcatgccaaccgtttttcctgttaattcatttcctttaaatttgacataagcctgcaggtaatcactgttccactttccatccttcagccattgattcgaggcgctggtatggcgcagaaaggaaatcacatttccaataaacatttcagcaacggcttgtgcattccgccctggtgtataaaaaacaggtatgcctctttttgaggcagctgccacatccacattagagggcattcccctgcaaacaccgacaaatgaaagttcgggaacagaagcaaatacgctgtctgttacctgatcaagttcagtaatcaagcctgtcgcatttgttgcttttagcagctgaatgagttcatcttcccgatatgccctaccttgttccttccaagattgataagtaactgagccaaataagttttcaagctcttttcgtccttcttcgttgtacggtgctgtaaccaaaaccgtcatggtgcaaaacatccttttcattgtatttttcataaaaaaaatctctttccgaagatggaaagagattcatatataggcgcgctctgttacaggcagacgccggtataaaccttgctttcctatctttcaagctgacgcttgctggaattggcacaataatgttgccgaggtttcatagggccagtccctccacctctctggatagaaaatgttgagtatgtaattttcagaataaagaatacgtttatcataaagaagtctcagattgatgtcaatctcttttttcagaattgacgttatgatccgaaatgttataattcttacaaaatatctaactagagagaggaactgggccatgaaatcttttgccacacaacaaaacggcattttcaaatccgtttgctcgctggactgcccggatcagtgcggattgttaatacataaaaaagacgaaaaaatcgtaaaagtgcaaggagaccctgatcatcctgtcacagccggaaacatatgcaacaaagtccggaatatgacggagcgcatctatgatgaaaagcggctgactacaccgctcaaacgaacaggtgctaaaggccaagcgatatttgaaccgatttcctggaaagaggcaatcgatacgatcacctcccgctggaaacagctgattgatgaagagggagctgaaagcatacttccttacagcttttacggaaatatggggaaattgacagctgaaggaatggaccgccgctttttttaccgcatggggtcaagccagcttgaacggacgatttgcagcaaagcgggatctgaaggctataaatatacaatgggcataagcgcgggaatcgatcctgaggaaaccattcatacaaaactatttattttttggggaatcaacgcggtcagcacaaatatgcaccaaattacgatcgcccaaaaagcgcgaaaacaaggtgccaaaattgtcgtgatcgatgtgcataaaaatcaaacaggacgtctcgcagattggtttattccgataaagccgggaaccgacagtgcacttgctcttggcatcatgcacattttatttaaagaaaaccttcatgatgaagcatttctgtctgagtacacggttggctatgaagagctccgtgaacacgtgaaacaatatgatcctaaaaaggtatcgacgatcaccggtgtcagtaccgaagatatttaccgactggcaaaaatgtacggggaaacctccccttcttttatcagaatcggaaacggaccccagcatcacgataacggcgggatgattgtcaggacgattgcctgtcttccggcgatcaccggccaatggctgcacacagggggcggcgcaattaagcataacagcggaattttagaatataatacaaatgccttgcagcggcccgacttattgaaagggcgcaccccgaggtcgtttaatatgaatcagcttggcaaggtgcttttggaaacagacccgccgattcgctctctatttatttacggaacgaaccctgccgtcgtcgcacccgaagcaaacaaagtcagacagggcttgctgcgggaagacttgtttactgtggttcatgatttgtttttaacggaaacggctgcatatgcggacattgtactgcctgcaacatccgcttttgaaaatactgatttttacacctcctactggcaccattacattcagcttcagcagccggtgattgagagatatggggaaagcaagtctaacactgaggtgttccgattactggctgaagccatgggattcacagaccaggagcttaaagattcagatgaagtattaatccgccaggcgcttgaccatccagataatccgcatttggcagagattgattacgatgcactcactaagcattcatttatgaaagcaaaacgcgaaaagccgctgtttccgggcgaacttccaacgccaagcggaaaaatagaattatattcagaaaaaatgaaacaagacggcttcccggctttaccgacatatacacctcttgtaaccgataatgaacatccgtttatgtatgttccggggccaaaccataatttcttaaactcaacattttccaataatgaaaaacacatcaagcttgaaaagacgccaaagctctttatcaacacaaaagatgctgaagaacacggaatcgttgatggggcacctgtacgaatttggaacagccggggagaatgcgagctgaccgctgcagttggagaacaagtgctgccaggtgtcgttgtcagccaaggattatgggcggatgaacaaggaaaaaaacagcttgtaaacgcgctaaccccagacagattgtccgatatgggcggcggcgccacctttttttcaggacgcgtgcagattgaaaaagcataaacgaaaaaaccgcccagaacatgttctggcggtttttttttggttgataatgaaacccggagtatgccaagcccgtataacataacatcgacataatggaggcatgcatatggacgtttttttaggaatcggtattgctttggctggctattttatcggtgaaggcttaaagcagaggaaccaaaccaaaggtaatgaacaaaatgatatcttcctaataaaagaacgggatatttacttttacattggactttttttaggaataacaacgactgaagcaaaacagttagctggagacatggcagacctgccttacatcgaaataaacggaaaaaaatatgtccagaaacatatgttaaaagattggacattcacattagttgaaaaacatcagggtgaataaaacaaatctgaggagagcgagattcattgtcacgacgctctcctctgtttagctgtatggattgaccgccaccaaaactttgttctataagcgctgataaaacgataaaccaccatctatgttctttcctcaaacaactcaagatgcccgttccacaacaatagtttttatattcctttgatgacgtgatgttcttgatgaacgtatgtatcgtaaaacacttagaaaacctattcggtttgaatgtgtgctctcattatgcccccatactgcgcctttatccgcggaggatttttttaaaaaaatatgaaacctaaagcttttagatcctgaatttttattgaacctccatatttctccgattggtaaaaattagcctatacaccggaagctgtacgtttataaaggatcagagaatcccataaccagtaaatcactgcagccgcaatacttaacatataataaaagtacgattgcaatgtccatgctattgacgcaggttcattgataacaaaaaacaggaaagctgcgataaaagcaaccacactgtaaatcaataggtacatgacattgaatgttctcgcttttttctgcaacttcatttggagcggaacagcaaaaaggccatacaccacaaaaccgtataataaagcaattgctgccgtaaacaatgcaattatcatatcgccatacataacgaaagaataaaaccctaataacaaaccaaatgtaaggctggatagccctaatgtcattaaataatatgatgcgatttttttcattttttcaccccccttgtttgatttattcacagtgctgttagtataaattcacaacctttgtattaacaatgcgatgataaaaggtttcaaaaatacgactttttattaaataatacgactggcatgaaaatgcctctcctgattagccaaagcgcgaatgaaaaaaagtgaatgaatacctgatcaacagacaaaataagaagagttgatattcaacacttttcgtaaaggagtgaaaccaatgagtaagaaaggtattcaaaattcaagtattgaacaaataagaaatgaccatgagactgaaacagcttttaaagcagatgatcctaaaaaacacggttccgatcctaaaagaacgaaataagttcttacccccactaaaatatcaataatctggaggaagtaaagtgactcaaaaaaacggtgcagacagacctgatgattataaaagattttcttcattagacaaggaatatgattttcagcaatctatacgcagcaatactgagacagaaagtgtaaacactgaaacacaaactcataacaaagaaaacaaaaatgacacaacagatgttgccgggaaatactttgagccctcagattataaaggaagcacgcaattagaaaaaggattggctgaaactcatgaacaggtgagcgatgactattttgaagggacaatcgatcaaaatttggactagccatacaaacggagctacttaaaagaagtcagttagctccgtttgtagaaacaaccacagtaaaagtagccaacccccaccgaataagatgggggttgcacgtaagtagcctgtttaatagttaaaacgattaatgacggtttgaagttcttccgccaattgggatagagattctgcagcataggagatttcctccattgaatgaagctgctcctgtgaagattttgcaaccgcttctgtatttgctgacgtttcttttgtaccagcagccaatgtatgaactgtgtgctgaatcacttcaacgcctgatgtaagctgttgagttgccgctgcgacttcttgtatttgagaagtgacctgttccacgaggttcagtatttcattgaaatttcctgttgcctcttgagaaagaacaatacctgagctcacattttcttgaacaaccttaatattatttaccgtttctagcgattcattttggatggtcgctaccaccgattggatgtggtttgcagatttatttgtttcatccgccaacttccgaacttcttctgccaccacagcaaatccttttccttgctctccggctctggccgcctcgatcgctgcatttagtgccaacaaatttgtctgctctgaaatcgtcgtgataagcgaagagatatcgctgatttctgctgtgctcgctaccaatgtctgcaatccattgccggctgaatctacagatttatctatgaatttcatctgatctaacatcttgttgacggacttagagcctatttcagccttgtctctcatcgaagaagaaagatccgctatgttccctgtatttgaagcaactgatgatatactgtctaataattcagtgatggattctgcgctcttttctgtcattgagctttgcttcacattgctgtcggcagccatctgcatggctcgggaaatatgttcagatgttgatttcgattcttccgcgcttgccgataattcttcggaggaagcggcgacttgttcagatgagctgctgatctgcttcacaatttgagttaatgaatgagtaaaagaattaaacgattgggcaagctgaccaaattcatctttatttttcacaatgacttttttggttaaatcagcgtcgccatgagcaatttcctctagctgcttatttatgcttcttagtggcaccataatggactttaacagcattatgcttagaacaatgcctaatattactgatatccctgtgacaatgataatgagcgattgactcattttcccattgccctgtatttcatcctttagatcctctacctcttgatccaggcgatcagacagcttattgacagccggatctacgacttcttttcttaatgttctttcttctccaaaatggatggtttctgcttttttaggatttgaagagtaggctgttactacctgctgattcaaagctctatactgagtaaaacttgtcttaatgtcttcaatattggattgatacttctcttcatcaatcaagtcattaacccggtcaaggctctttaagacatcgtctgctttttccttcataccctcgtcgtattctttgtctccggtaatcaagaagcctctttcatcatttgataacccggtcaattcatattggatgtgttttatctctttttggaattccattttgtctttaagttcttcattctttttcacagtagaagaaatcataaatactgaggagcctccaattccaataattgaaacaactaatattgatataatccccagcaattttgttttcactttcatgtgtcgttttccctttccgcacaatgtaatggctgaaataaaatatgttcaagcgcgtttgaatccaattcgcttacgctcatgtccataatatcgacacgtgttatcaagttttatagtgctattttcatatgaataagctaattctttacggctctaaatcttcagaaaggcttcacgaaaaattgactgtcttttgtcgtataagtcactcttattctcattttctattaggcatacaaaaaaggcttttcccacctcaaattggctgaaccggctgttttctcgaaaatataatacaatacgcagcataatatgaaggagcgaaacttaaatggggatcatcaatggtaaagaattcattgaccgattgaataaactagaaaacgaaatatggtatgatggcgaaaaaataaagggtaacatttctgagcatcctgcatttaaaggaataatcaaaacaaaaagctcactttatgaattgcaaacaaaggatgagttaatacatgaaatgacttattgccttcctggagatcataatcgaatcggcctttcctatctccagcctaaaaccaaaaatgatttgaaaaaaagaaggaccatgattgaacattgggctagacatactcatggaatgatggggagaagtccggattacatgaatacggttatgatgagctttgcttcgtcagcggagcttctaaaagataaagagaattgctttcctgaacatatactagatatgtatgaacaagctgctaagcatgacctttcctttacccatacattcattactccgcaagtgaaccggtcacagtcctattttgggctaagtgaaaaaccgatatctgctaaagtcattgatagaaccgaaaaaggtttaatgattcatggcgcacgactgcttgcaacacaaggcgggttgaccgatgaaatcttggttttttcagcgcctaaatttttctttgaaacagatgaagcttatgctttttcaatcccttctaatacaaaaggcgtaaaattcatcacaagagaatcatttgtattaagcgactcttcctttaatcatcccttaagctcaaggtatgaagaaatggattcaattgtggtttttgatcatgtgttagtgccgtggaatcgtgtgtttttttacgataatgtggaagcagctaaagattttatgacaaaaagctcttttcatgcctttacctttcaccaggttgtcattaggcaaatgataaaaattgaatttctattaggtgttgcacagcttcttgtcgacaccattaatgtttccgaatatcagcacatccaagaaaagctctcagaaatcattgtgggattggaaacaatcaaagccctcattgacaaatcggaaaatgatgctcagttagatgaattcggctatatgcgcccctgtttaattcctcttcaagtcatcagtacgatcattcctaagctatatcctcgatttactgaaatcatacaattaattggagctagcggaatggtgacactgcctaccgaaaatgcatttgactcagagatacgggaagatcttgaccaatatcttcaagcaaccaatacaaatgctgaagaacgtgtgaaaattttccgtttggcatgggatttaacaatgagttcattcggaactagacaaactcactacgaaagatattttttcggagatcctattcggatttcaagcaggctgtataccagttatccaaagcaggagcagttgaacatgattaaaacatttttacatgcagatacagaacattgaaaaaacagcgggaaaagatccgctgtttcgtattttttattcaggaaactgaacatggcccggtactgtataggctttggacgttccgctttcaggcagctttggaatggtgtctttcacaacttttccgcggatgtcagtcattctgactttgagagagccagtacctaaattcgtactcacaaaatggttatagtccattttctccatgttgatccacttaccatccttttcatattccattttcataacaggatacttgtgatttctgacttggattgctgcccaccacctgctgctgccttctttgatccggtacgtgaaattgccggtgattggggctttgacaacacgccatttaatattgatttttccgtctttcatattgccgattttacggaaggcattaggtgacagatcaagagctccccgagcgccttcgggataaagatcagtaacatatacggttgttttcccttttggcccttcaacttccaaataagagccggcaagtgccgcttttactcctccgtaattgagatccgccggatttattgcagtaatctccatatcggaaggaatgggatccagcaggaaagctcctcctgaataacctgaccctgtatacgttgcataaccttcatgcaggtcgtcatatgctgccgaagcttgcggggaaaaacagaagatcgtcaacaaaaccataccaacaaatgcactcatgatctttttcatatttggtcctcctcaaaccagactccaaatgagaatcattatcattataagactcaatccatctggtttgaaagaggaaatagattcatagttgattttaaggcaaattcactatcattcatatatcaaatgtaggtacttatgaaaaagccaatacaaatgaacgaatgtgcacttcagccgaatgtcttatttttccctctcaaaattcgcatttcaataacgaaatgaaacaggctgttggcctgataacagctatacaggaaaagctatttttccccgctcagtttcaacttagctgtcatcatgatgccaaagatcagcacaatcggaacccaaataatgaagtgataaaaatcaggctcagccagagcaacaataatagcccctacacaatacaaaataatagccagtgctcttaacacagtatctcttaagaaagtcttcttttgcttcttaaaaaacaaacggccggatatatcctctaaaagagaagccaaagtgccggtcaacacagttgaagaaatacctgcaatccccagtttttttgctgctgtagtttgaatccccatagaaatgctcatgagtataattagaatgtgcacaggaacaaatgcccggtaaaaagaaagacaagcaaagacaaacaaaatgaatgcttcaagtgcgagggcttttgtcacagcagaaggccaaagggtattttccgcctttccgaccatcaatgtagcaatgatcacgccgcatataaatccgattagcgcagtcaaggaattaaaaacagtgacttgaatggatttgccgatagctaaccccaataatacaatgtttccagtcatattagctgtgaacacatgtcccaggcttaaatacccgattacatccacgattccagctgttaaacataaaagtgatagcaaggtgtttcgataagctgctgcagtcaacggtgtatcaatcctttcttctatttcaattgttagtatgtcttttggcgcaatctctattttttaagtaacccaacattaattaggaagatagaacctatcattcctttccattaactgtaataataatccccgcaaggaaatgattaaaattgaaaggaagcatattgtgatgaaacgactttgtttatggttcaccgtctttagcttgtttttggttctcttgcctggaaaagcattaggtgcagtcgattttccgaatacctcaacaaatggccttttaggttttgccggaaatgccaaaaatgaaaaaggcatctctaaaacgggcacaacgggtggaaaaaacgggcagattgtttacattcaaagcgtaaatgatttaaaaacccatctaggaggatccactccgaaaattttagtgcttcaaaatgatctttccgcatctgcgaaaacaacagttaccattggctcaaataaaacactcgtgggctcttacgcgaaaaaaacgctgaaaaatatttatttaacaacttcatcagcttctggaaatgtcatttttcaaaatttaacgtttgaacacagtccgcagattaacggaaataatgatatccagctttatttagattccggtatgaactattggattgatcacgtcacattctcaggtcatagctataatgcaagcggaagcgatttggacaaactcgtgtatatcggaaaatccgcagattatatcacgatcagcaactcaaaatttgcgaatcataaatacggtttgattttaggatacccggatgattctcagcatcaatatgacggctacccccacatgacaatcgccaataattattttgagaacttgtatgttagaggcccaggtctgatgagatacggttactttcatgttaaaaacaattacagcaataattttaaccaggcgattacaattgctacaaaagcaaaaatatattccgaatataattactttgggaaaggcagtgaaaaaggcggcatccttgacgacaagggcactggttatttcaaagacataggcagctatccatcactcaacaagcaaacctctccgctgacttcttggaatcccgggtcaaactatagctatcgtgtccaaacgccggaatatacaaaagaatttgtcacgaaatatgccggatcacaaagtacaactctggtatttggctactgatataaaagaggccctgcgttaaaaacgctgtgcctctttttatacttataggctatttttaagcgatccttgtaactccatcaagatccagcgtcggtcaaaccaaaaagcatatgtttttttccgcaataacttcttaaatggctttcttattataccagtttatcgcaagtaaaaagaaatcattgttctggtcctgtattaaatcaacgttcgtcccacacactattcaaaaacccctaaaaaggatgatggatatgtgcggcaggtttactttgtactctgcatttgatgatattattgaccagtttgacatcgatcaattttttcctaaaggtgaataccagccaagctataatgtcgcaccatcacaaaacatccttgcaatcatcaatgatggatcaaataatcgcttaggcaagcttagatggggacttattccaccttgggcaaaagatgaaaagatcggttataaaatgattaatgctcgagccgaaaccattaccgagaaaccggcctttcgaagaccgcttgtcagcaaacgctgcatcataccagcagacagtttttatgaatggaaacggcttgattccaaaaccaaaatcccaatgcggatcaaattgaaatcatctgctctttttgcgtttgctggcttatatgaaaagtggagcacacatcaaggataccctctttatacctgcaccatcataacaactgagcctaatgagttcatgaaagatatacacgaccgaatgccggttatattggcccatgatcatgaaaaggagtggcttaacccccaaaatacaagccctgattatctgcaaagtttgctgctgccttatgatgctgatgacatggaagcataccaggtttcatcattagtaaattcacctaaaaataattcagctgagcttcttgatgcagaaaatcatatgtagtgattgaaattctctagcaagaacttgtcaatagctttgttccttaggtgccaatccctctagtaattatgaatatttagtacatagatcaattagttttcgatatcagttcgaaataattttattatgtaaacttaaataagcaatgttatccctttcatataaaatagtttacatttttataaagtcgcttcacctttctattttgtcagcaaaaaaactgaaccacattaaacttatgaaacctgccgcacctgtgattgcaaatatgatataagcccatagaggtaaatccatacactttccatcctaagaattaaatgaaatttctttcatcttacatgaaggtcttctttcttttgtttatccagtgtaatacttaataatatgttgatgaatgcagctggaaaatatataaatcccactccaagaatgcctagtatcgtacttaaacttactatgtaattctttgtcatcgtttgactgtcaatcaatattagaagtgaaatcaatccagctaaaacacctataaaccaagcatcgccaacagcataagaatcatccagcatccctaaacatcgccccaatatagagctcccaatggcagtcaaactggataaaaatatgagtgctttcatttcttctcctcctttaaagccaatcaaactggtagaaatcggccattgaattcccattatcgaatggttatcatttccacattaacattttaaagctcattacaatacgattcaagcagaaaaaccctacataacgtatatatagggatttaataaaacacaggccaaaattcagctctatctactttaaaaagatatgaagggcagctgtgtgatctgttacgtctttacgtaccgagatatttcacaacaggcactttcttcttgcgcagagaatcaagcatgactgatccagcattcaagttgctttgtactaattctttaggcgtcaatgccatccactgattgagtgacacatctgcatagcggttacttttgaacatttctaaaaaccataatgtttctgtaccagtgttttgtatatagtgtccggcattagaaggcacgtatccaacgtcgcctgctctataatcaaatgtgcgggcagtcccatttccgataaataccgtcattcgtccctgtcctgttagataatattgccactcatcgctattgggatgccaatgaagctctctcatcgcgccaggctcaatctgaacaagtgcagcggctatcgtttttgaaattgggaagttagaagaatccacaattcgtacactcccccctggcatttgaattgggggttgatttaacagctcgtgtttaaaggtcatggggacttttccatatggtgactgaatgtcttcactggcgactgatcccggcacattcccttggtagatatagacttgctcagacggaagagagttgaaagcattctccgggacaccgaaatttgcagacagaacatcttttggtgtgtgtgcaagccaatctgaaatggttaacgttgaaaactcagaaaagttcccatcatcgaaaacgagcagaaactcgcagtgttccaatccctgtatggaatgcggaattcctgccgggaagtaccaaaggtcgccgggaccaacatcagcaatgaaatttcgtccgtcttggtcaacagcggtgatacgtgcccgtcccaaaagcatataagcccactccgcttgcttatgccaatgaagctcgcggacgcctcccgcagttaagctcatgtttacacctgcaatcgcagtcgaaatcggaagctgtcttacggtgatttctcttgaccagccgccgtgatctaatttcatgggagcgtctgagaatgaaaatctcaagttaggaatcataccctcatctgtaacaggcggaacaaatatattcggattttgaatatcccgtattatatttcgcgggcctgtatcaatagctccagctccatcacttcgaataggctgcggcacgtttctgtcttcatgattgattggttgttgttccaacagcatgcacctcgttttagaaatgaacaagattttatttcagcctatgcagaatcttagattgctgtgcctaggaatccgcaaataaaaaagtgaccaccaatgtgatcacaaatacatcaaataaactattttttataccatggcttcttatgtaatttgattgcttctgtctgttttttctggcctgtcctccactccacttttactaatacatcatgtcctatcacttcatcttcaggcatataatcaaaggtggaaatatggtcctccatgcgtcccccacccggcatttcatcacctgtgtactctgataagtcgtactcatctacgttatcatcttgatacttttcgccatctacatacagagtaattctttcaacaacagtccacttttcttccttcttactcccctgccaatatagatttagaaaataattgggtccaattgaagttttgtctgatttttcaaggttagacatccacagtccgcttttcccgctgccctcatatttcactttgtttcctgacaccattacaaataatgtgatgatgcagatgatcaagaatccagcaatgatcaatagccatttcttaatattgttcttttttctcatgtttttcctcactttcctaactttttagtaggaaaatacgatcaaaatgttaccgaaaagaaaataaaaaagggctaatgatctaacagatgactgtctaaacttttgacttaaattaaagtgctctctaaagacaagattaaaacgtataacagctcttaaatgcattttttgtttcattgagtcaagaaccttaaaatggctttttattattaaaaatcaagctagtgtattaagtaacttttcaaatttatttatactcatgatctcgtgagtcacaaatcttccatcaaaaaaaacgctaaaagttgtccaaatagctggtgacttttgtgcctcttctttcgatgataactgaattgactgaaattgaacccctttcttttcagtcaattcccgcaaatcatttatcatgcccactgcaaacggacactgagctgtatagtatatcgtaatccccttttcattgatagaatcacttttcacctggctcttaaatgcaggagaagctgcaaggccattccaagtcaaagccattaattgaaaataaggggcagcttcatcttgtagagtaaaccccatatgctcaaagaaatgcttatcacttaaatagggcagttttttcttgcctgcgatatggataatgccatccatgccgcacgctttcgcatctgctatacatttgtccaacaatcgtttcgcatgaccgttatttttatatctgccagacacccacagacaattaatgtacataaaattaggcgcattgataggcacccatgcctcattcgcaggtaggtattcaataaagacttttgcccgttcatgtaagcgatagaacaccaatccttcatccattcgagctttgagccatctcttcttttcattaactgcatgctcatattgtttcgtgcctaatgcacagcaaatatgattgtcttcaatattgtcctttgtgatttcaatgtagcacatctcctcttttccccctttaacataattacatggaattcaacttcacactttacatgcctaatagaataaatacccgttccaacttaaatactttttcttttccattttgtcaattaactgtaaaactcttcttttattcagatattatcttgattcctatatcacccatttcaaatccaaagtgtgttcatctttgaggattagatgcactgcttatgctataaatacagtacacgaagttttttatttgaagtaatatttgttacgggacagcaatagtaaataagtgataaaaggggaattaaacttggtggaaaaatgttattcttgtttaatttgcagatacaaaggattatttcaaaatcctttgtataaaggcgattatcaaaaaacgtttgacatttgtccatgttgcggttttgaatttggctacagtgaggatcatgatgtgaggttaggttttattgtaactcctgatcatttaattgaggctgcatttcaattgtatcgcaaacaatggattgagagcgggatggtaattgctcatccggaagatattccagaagaattgaaaaatggcaattgcttaaaatttgaagttttgttgaaacaattgaaaaaactaaatcttgacatagaaaattttgaaattagcggtttttaatgatgaaacaggttgcacttgtttaggtttcactgtcattatcagtaaaatgttaagttgaaatgcgcagtcagtcacaaagtctctattcgtattcaataaagactttgtgatcatcgacaaacatttcactcccatcggataaagtatccaaaaggcctcctctggttcttctctatagtcattaatcacagtcactttgacatttgactcagctatgattggttttccaacaatttttcgttttttcctcaggcaaagtaagagatcgaatcatcaaagccattccatctttactgtctaattaatgccatcttcagtgaatttaaaggtctgttttaaattgcgtccttcttgccccttctgtgtccaaattataacaacctctaattcagaggccttatctgccagcataaaatgattgaacttcagcggtgagccatcatttaaactttcagctaacattttagaatcttcttttggtttgacacaattttcatcgggacatccaaaaagcgaaaaccttgtgattgaattagggtcatttctatacaattgcacatccactgtagctgctttttcccctatatttttgacttccaaggaatatacttgatattctcctttttgaggtctcgtaaattcctttacattttttgcttcacttacttttactgaccactgttctgttttttgtgtaataggcaacaccgtaaaagtcagggcatgcgcttttgattggcaaaacgtaaatccaactgctgtaaaaacaattacagaaaataatacccttttcacttcatttatccctccttcctttcactggccgctccttaaagaattgattttgagcaatctacaagctctcttaaccaaaaccttacctgaggttttgtctttactgctctgcatttatttctttcggtatccgagaaggagctttggggatttttctcaatctgctgttaatcacatcagaagagtatagcgtaataatcatacttctcccatacctttttgcccgaattaagattggttggttatattggttttgaaagcgaaagtcaggacctccccagcttaccgtcgcatcccgtccgggcggtacatatggtacacttctagtatgagaatagcgctgaacgatctgcagtcctgcacgatctactgcattaaatagagttgaggacacctgacaaattcctcctcctacaccttcagacaactctccttttacaataatgggtgcacttttatatcctttgttccgagttctcattcccacaacttggttaaacgaaaacgtctcattagggaaaacaacgtgattgtcgattgcttttgcagaaagagaaatattgtgtgaacggcttttattgcttgagttaaaatacgtcacgtactgaccaagctgctgcgtactgatgtgagctagcagctcgctgtcaactttcggataaatgttcatttccggcacttctatcttggagggaccttgcccataaaaatacgcataaaacttttccataaacgcctgttgatacagtttgtagccaaccctgcccgggacgatgcttccatgatcgttaaggacagcatttatcggctcacggtacactttctgatcaagctgtttgatgaatttactgtatttttcatagtcaaccattggagtgccgggaagaggcattgtaaagtcttcacggttaacagtggcaatcgtccgtccttgctgtgtgaccgttaaactgtcctgcggctcactcggctgagccaataaaaaaagaccagtgatcaaaatttgtatcataagtcggtttacctcccaatcattagtatgaacagccgcttatcctttgatgtatttcttcccatcgtttgtttgaatctttagacgttgataaaaaccttcataaaagagcttagctttatgttcacaccgatccctgagctcactgaggcacacggttcattcagtcggcaagtttgaagtagttcagcatctcccagtgatgagggatgcttttttgtcttgtcaaaaatgaaaagggtctcctataacaacaaaaaatcaatccatttcaatatttttttattgagaaacgataaattttttgttacattcaattagacaacaaataaatgaggtgcttgttatgaatcgaatgtcgacaatttttttaaagatagctttggttcttattggaattccaattcttgctttatgcatttttttagtgcctaaggtagccaactattcagcagaattatttccaaatatcgcttatataaaatatctcgttttcatctatttgtatgtaacggcgatacctttttactttgctctttatcaagcgttcaaacttttaagctatattgacaaaaacaaagctttctcgggtttgtctgtaagagctttgaagaatataaaatattgcgcagtcactatcagtatcttttacgcagcaggcatgcctgtcttttatctgatggccgagatagacgacgccccgggtatcattgtgatcggattggttattatttttgcttcaatggtgattgcggtctttgctgctgttcttcaaaaactgttaaaagaagcgattgatataaaatcagaaaatgacttaacggtctgaggtgatgacatggcgattattatcaacattgatgtgatgcttgctaagaggaaaatgagcgtaacagagctttcagagagagttggcatcaccatggctaatctttcgatattaaaaaacggaaaagcaaaggctattcgattatcaactttagaagcgatttgcaaggctttagaatgtcagcccggggatatattggaataccgaagtgatgaagacacaggattcgtaaagaaaaaatatgaaggatcaacagaaaaataaagtgattggcggtgagcttatggacataaacttatatccatctagctgctatactaagcgtccctttcatacacgaagaacacaactatggaggaggcatacatcatgagagccataaaacaaatcgttcattttggctgggaacaagccctttcatgtttgtttcctgccgttatttttgcctctttggctattacgcaaatcatcccactgcccttcttgccgcggtatgactggctgctcattatctgcgttctcatgcaattgtggatggtgcgttccggtcttgagacacgggatgaattaaaagtgatcacattattccaccttattgggcttgctctggaactttttaaagtccatatgggctcctggtcttatccagaagaaggatactccaaaatatttggagtacctttgtatagcggctttatgtacgcaagtgtagccagttatttgtgccaggcatggagaaggcttaatgttgaactggttaagtggccgcctttttttgcagttgttccgcttgccacagcgatttatttgaattttttcacccaccatttttctatagactttcgatggtggttatctgggcttgtcatcattgtcttttggcaaacatgggttacatacgaggtgaatggagctcgttaccgtatgccgctcgcactttcttttgtactcatcggattttttatatggatagcggaaaatatcgctacgttttttggagcttggaaatatccaaaccaaatcgatacatggagtctcgtacaccttggaaaggtaagttcatggctcttgctagtgattgttagctttcttatagtagcatcattaaaacaagttaaggagcagagtcccacaaaggcagagatggatgaatctttttcttagcatacaaggtcccaaatagagtgaaaagcaacgttcaaatggttgcttttttcttttatgtaactctgccggtgagtattcatcttcttcaaatttcatcgcaccacgataactgattcagattacaactgctttcaacacattgataaactcatgcgccgccggcgttatctcttcaaatgaatgtacgatgacgccaatatcgcgtgtgaccctaggaaagatgtcctttttaatcaattgatgcgggacggatgaaagtgtaaagtttgaaatgatgccgatacccaagttatttttgaccatattaatcaaggtttcggcattttgcacagttaagttttcctttaattcgatgttgtattgcgaaaatgcgtttgacatcgcgatttcatgaccgcctttacaaaaaatgaggtcatcttgatatgtttcaaggtcgacatgcttttcaagttttaattcgtcacgctgcggcgggatgacggccaccatatagtcgttacacaatagctgattttcaaacggttcaaatggagatgctgcgattccgatatcaaccgtccgatcctcaacccatccttttatttggtcagaggttccttcgatcaattctatgcggatcagcgggtagtttgatctgaatgcagcaatcgcctgtggcatgatatttgttgaaactgcaggaaatgaaccgattttcaccttcccgtttaacagcttgttttcccggttggctacttgatatattttgctttcaattcccttcatttgcctcgcaagcagcaatatttcttttccgatgtcagtcagcattaaaccatgatgtttatccctgatcaataatttgagctgcagtgagctctccaggttttttatcgctttgcttaccgccggctgagagatgaacaattcttttgccgcttctgtaatattcaatttctccccgacttttacaaatatgtgaagatggttcatattcataaccatttggttatacccccaataataaaaatgtatttcagttatacataaatgtaacatatgatagaaaccagcacgatatttaaacaagaaaggcggcttcattatggtaaaagttatgctgggaatcatatctgtcacacttatttggggttatacttgggttgcgatgaaagtaggaattcatgacatccccccgcttttattttcgggtttgcgcctgttcatcggagcagttcctttatttctcattctcttcatccaaagaaaaaagctttcaataaaaaaagaacatctcaaaagctatatcatcatgagcctgttgatggggctgggctatatggggattttgacgtatggaatgcagtttgtcgattcagggaaaacctctgttttggtatatacaatgcctatatttgttacggtgatcagccatttttcattaaacgagaaaatgaatgtgtatagaacgatgggactggtctgtggcctcttcggactgttatttatatttggaaaggaaatgctcaatatcgaacaaagcgctttatttggggagctgtgcgtacttgcggcagcgcttagctggggaatcgcgaatgtgttcagcaagctacaattcaagcatatcgatattattcacatgaatgcctggcaccttatgatgggagccgtcatgttattggtgttttcctttatatttgagccggtcccttcagccgagtggacatatcaggcggtgtggtcattgctgtttaatggcttgctttccaccggctttacctttgtcgtatggttttgggtgctcaatcaaatccaagcgtcaaaagcatccatggcattaatgtttgttcccgtattagccctattctttggatggctgcaattgcacgaacagatcaccatcaatattatcctcggcgcactgctgatatgctgcgggatttttatgaatacatttacattttcacgacggaaagtgtgaatgatatacatttcccctgtcatttgggcttcatgtgacaggagacgactattacgagaaagtcttctagaatcctgacgacagcctattaaacaatgaaaaaagctaatgtctgcatgtagacattagcttggctggcgtttaggctggtgagaatccagatacttttttattaccattctggctgatcaaactgaaaaccgtatagaccttttactttaacatctccgcaatctggatcttttgtcaaaatcaaataatgagtcttataaggcatcgtctcaactcgatcagttgcactcaaatcaaaatgatcccctgagaagtttttttcactaacggttatttcatatcctgacaaagtcattcgcatgattcttgcgttaattgtacatccttcagtatcgaaaatggtgaatctgtacccaaagtgagatgtccaatggtttgaatttaggtcatcagacttcataaaccatttttcattttctgtcattgtaaaactcactttctcctcatctttcacgataacagccgaagcttcccctacatggatagtcaaagccaaaagaaatgtaaaagctaacatcaacatctttttcaaaagagttcctcccgatatctttttacttcaatttattggaagggtcttttctgatcaagacagtcttctccaaatgaatctttagcatcatgaaatgagccttaataagaacagttttaacccaaatcaaactctattcgaaataaggcttaccaatctatattctttttaaaagtttctgcatttctttatatagctcctagacacatataaaaaatgctcccataagttcaggagcactacaaaaaactgctaaagtgttttctatcgatttattgtattcattagctcaaagaagtattcaggcttataagtcttattcagcttataccatgaacgcaatgtatctggtgcaaatacttctaattttttcaatacttctaccgcaaattccagaggagcaattcctgatgcagtaaccaaattttcatcagatactgcaggttccttttcatatagtgtttctcctttgtaattagggcagaccattttcatatactctaggtcattgcttgtgtgctttctcgaatttaagtatccttcattcgcgaggcccaaggttgcaccacaaatcgcagcaatagtcgtgccaagctttaaagcgtcgccaacttttttcaagatcggctgatgaatatcttctccccaagtgtttcctccgggtaaaatgataagatcttgactctcaagagtacactcatcaagagaaatatctggttttatgcttaatccgcccaacgtagttatcatttctttattagcccctactgtaactacttttaaagatgctgcatcctgtttaaaatatctccctgagtttagttcagcaattaaatatccatattcccagtctgacattgtgtgaaatacgtagagataaacttttctcgtttgcatccaataacactccaatcacaattgataaagctttctaatagatgactttgctgacagccattgtcagcatatgtattctgatttgcctattcttatataataccatgtaggtgggcaattgcccttgttctcccaacttattaaaaatataagataaattgattctatgtttactagcgcaaaggggtttgttacactaactgtcatgggaaacatttcaaaggtaatataaaatcatttgaatgaggaggcctgatgaagttgaaaaataaagcgtcaataaaattcggaatatgtgttgggcttttatgtttaagcattactggtttcacacctttttacagctcaacacatgccgaagcaaaatccatagaagacacaaacatggcaagctgtataacgaataaaaaatttgttcaacttgagaaaaaatttgatgccaggcttggtgtttatgccattgatacaggttcaaacaagacaatcgcctatcggtcgaatgagcgatttgcttacgcatcaacctataaagttctagccgcagctgctgtcctgaagaaaaactcaattgaaaaacttaatgaagtcatccactacagcaaggacgatcttgttacatattctccaatcacagagaaacacctagatacaggcatgagcctaaatgaaatctcggaagcggctatccgttacagcgataataccgctgggaacatcttgttgcaacagcttggcggccctaaaggttttgaaaagtcactgaaacagattggggatcatgtaacgaaagctaaacgattcgagacggatctaaactctgcgattcctggtgatattcgtgacaccagcaccgcaaaagcactagcaaccgatcttaaagctttcactttagataacacgctcacgactgacaaacgcacgatcttaaccgattggatgcgaggcaatgctactggtgacgaactgattcgggcaggcgctccaataggatgggaagtcggcgataaatctggagccggaagttacgggacacgaaacgacattgctatcgtttggccgcctaacagagctcctattgttttggcaattctgtcaaaccgctttacgaaagatactaattatgataatgctcttatcgctgaggctgcaaaagtcgtccttaacgatctcaaataatatgtttagccttttgccacaaaggaaaagacattacttttttaactcctaccgttcattttttgatgaacggttctttcataagacctctagaatcatatatttaaacaccacaaaattaaacgttattatatttaacggcaagttttcattttatggaacaagtaaagtttgaatctgacaagaattaaggctaagcaccctaaaatccgttttctttccttccaagaatatactccttagtgcaagccattataaagaagtgaacatacaatgcagacaactcccttaagtctcttattctgtgaccaatttgtaatactcatgaatatccggactcacttccaatatttcgtctcgaagacactaacatatcaaaccacttgaattaacataactgaacttgatattggtcactggcagtttcaatgcaatagaacaacatttgttgactcagaggttatctatatgagaattcaacaatttttttataataattcatatttttgtatcgttgcacttggtggatttgactcttttaatgtatggaaccacacttttattttttcacctcttttgagatcatctgtgttatcaatctcacttaatcctacaattactatgttatttttaaacttgttcataagttgtccttcagaaagatcgtaatcttcttttactggagcttttgtatcggtaatgagaattgccctttcattgtctttaagcacgacatagcctactaggctctgcatctttgtttcttctccgtgttgttcatttttgcagcctgcaaggaaaataatgagcactatcaagcttactccgattttaggcaactttctccctcccgtaatgttaaacaatctcactccataactacatatcaataaactgtagtgtaaatctatccagaaacttcttcattttctcatattgaatcttttacaagctgttaatacacagactaaatcgggtaaaaattcgtagaggtgatttctttgaatgatgatcattaagtaactcattactcttcatttattttttcaacaatcatggtattggcggtcgccatctttccacaatacacttcttggtttgtaacagttttcttcttgagttttgcacttatctatacattccaaatacatcaaacaagttcttcaaaagcaatatcttatatttcgtattttttattcattgtttcattgacttacactttagttaatatgtaatagtaatcctccctttgtgggaggattatttgtttaagcttatttctaggctgcttttgggccacctctatctataatgataaaactatctgaaccatttttttcttccgatctttgtcttcgtaaatagcaacattttggcgtgtcattaatgtaataccggccattttaaactctttttgatctttaaaataaacaacagggacattcaccaaacggatctacttctttttgttctttctcaaatgtttgtatgtggttgtcttcgaaccatacccttactcttattccgctaaaatcgagatttttactttttatgatccattattctctttcaaaataacttccaactacaacataatatatgtataaattgtaaatggagttgatgtaattgaagattaggaaaatcttattgagttctgctttatcctttggcatgctcatatccacggttcccgcattggctgctggcacttcgtctgaggttgcagtaaaaagtggtgaatatgattatgacactatataccgcattagtcctcttccaatggacttccagccaacaatagaatacaacggttatacttatacgcttacacgacattattttgattactcaatcgggttttacacggctatttatacaaaagttgtttaaatttataaaggagctttttagctcctttttctcttgttttaagcacaaatacaagtttaaatgctggtaataaaaaattcactttaaagaagcgccgcccgcaaaatgcggcttttgcacactacgccaattttatatagaaaagccagacctcctccaagaggttccagcttttcttaatgtgctatcgatcttcgttagttcaacgggaacttaatcattcggtacaaatgcagcctcccacttctagttagggctgatggcggaatatctgatggctctctacacatcagacattataagatttcaatgtagccttctgtaccatgaacgcgaattcgttgcccatcttttatcagcttggcagcattttcaacgccaacaactgcaggtaagccatattcacgggctataacagctccatgggtcatcagtcccccaacttcggtgactaggccttttatggatacaaacaatggtgtccagcttggatcggtaaaggaggtaactaatatatctccatcttctaaatcagcatcttccatgtttaaaatgacacgcgctcgcccctctatcactccggaggaaacaggtagacctacaatcgctccggctgggagattttctcgtttatactcacctgtaacgatttcaccatcagacgtgataacacgtggtggagatagtttttcatataatgtgtactcggcttttcgtgcgctgatgatttgataatccagtttatgtgtgcgtacgacttcgtgaagttcttcaaaagtgagatagtatatatcttctttttcatgaataacgcccgcttctatgagttgttcggcttctttcagtaaagcctgcttataaacgaagtaccgattaaccatgccgtattttggatattccctaaacccgctgaaattccggatgatatctatcattcgttttgtttctttggctttttgttcaccatccggtaattgcttcaatcgatctaataactcttgttctttcttcaaagcttcctgtcgcccttgctcaaatttccgatggctggcattaggctcactgttattgatattattaagaatcattgggataagtgtagttggtttttcgctccatcgagttcttgtaatatcaatttctccggtacatcgcattccgtatttgctgagataatcatagatcgcgtctcgggttttgcttccgccatcaaacttagccagttcatccaaaaaattatcatcttttacatgttgtaagtaatcaattacctctggataaggacgaatcacatctgcgacgtctaatagcgcaagacccatttctgaagtaatattatggggtacagattgagaaagcgtatctgctgcgtttttttcacctaaccactcgttcattttttcgttaatccataatgaagcattcatagcagttcgaatcacaacagaactttctgagttaaataaaatcttctttaattcctggatatcttccagaataaaacgaaataaatctgatcctgatttcgtttggatgttttgttttaactcttctatcgatgtttgactgctctcaatcaaatcagacacgattgtcggatcgttttcaacttgagccggcatatctgcattgcctctgctgggatttggtgctgttttatcatttggtatcgactttatgaaatctcgtcgccttattatggtcataagtgcgtcttttaagagctgatcgtgctgccccatgccttttaagaaaacttctctgctgtcaggggatgccagatgatgtgtgacatcaacaaatagccttccaccggctttacgcatgggtgcagcagtcgtcaacagaaaaaaagacaatcctagtggttttatgggatccgtcatcatttgttgatgaccaacagaaatatagacgtgattttcttggtcactcgcttcagggatggggaataaagtagtgattggacgactctgtacaatataaaaagtatcgcgggccaaacaccattcgatatcttgcggctggccgaaatgagcttcgatctgtcttccaatgcgttccagctgtaaaatttgttcatcagtcagtgtttgagccttttgctgatcagaatcgatctgatgtgtttctgttccgccttcttttcgtccgtagatagccaattttttagttgctattctcttatcgatgatttgcccatcctgtactttataacaatcggcagataccaatccggaaaccagtgcttcaccaagtccaaaaccggcatctatggataacacctttcggttggaggtaatcggatcagcggtaaataaaatccctgaagcctgaggaaaaaccatcctttgaacgataacggataaataaacttggctgtggccaaatccattttgcatacggtaaataaccgcgcgatccgtaaatagggacgcccagcatttactgatatgctgcaagattgcatcgacgccgataatatttaaataggtgtcttgttgaccggcaaaagaagcatgtggtaaatcttcagcagttgcactagaacgcacggcataggcatgttcctcgccgaactgggagagatagtgagccactgctttcacaacatcggaaggaatgtctacttccataatgatttgccgaatcttccggctgatgttaccaatctgatctcggtcctcaacttttagcatcgccaactgatccaacaacacttgtaacgtttcgttttgttcgatggcttttagatatcctactgttgtgacacaaaatccttctggtacttgtataccttgaatttttgataattcccctaaatgtaacccttttcctccaacgagcgaaaactgtgttttttcaatttcatgtaaaccgagaaccaaagaactcattctacatctccccttcaaaaaaatattgacaagagcttcctagcaggatataataaaattataagatggatatctataaccttttaaccagaaagcgcacgtagtgtgattatatcaccgtgtctgtttttgtgcaatataaaaagaacctgggcaatttcaccaggttctttcttaatttacataactagtcacattaaaaaacttggttcgatctgatacaatcctctaagggtatcctaaagttgggttcttttcgaactagtctgtcttgttccgtagagtccccatttatgaattagactttttgttcttaacagtcccaccgttaactagtataaagttatgaggatctggttaactactgagatatttttattttgagtaaggcttatgtttgataaagaagggttatgtaaaggtgtctgttgtgagcaagcgctgactacaaaaaattgatagcattctcatttaaataccattctattaacctatagaaaaagttataaaaccagatggagaatatcctacctccagtaattccaaggccgttcacctagtagaaaacaacctttaaccattactaacgattttaataatcattgattataaaacttctcaaggaacgatcatcagcccgttagctacccctgattaaagatgatctgctaccacactgttacgttagaacttccactactttgatatccttctgtcgccatgacttggtaagcccaattactgcccagattcattccatggctcttccatgcgttcacatgattgctgaaagtgattgtagcgttgcttccggttggtctcttcgtctgacgaacactccagtactgcgtaaaagtagtgcgatcgccatcaatggaaggtgcgttataacgtgtagttgtatatatgtcatatgtacccccatcactttttacagtacctttatacgttccggtaggcctataagtaccccatgaatccaccacataatattctatgaggggcgatctcgtccaaccatataaagttaaatatccattgccattcggtgcccaaactccggcattatagtttatcgtcctaaatggcgaacctgtagtccaacctttaccaacaacaaaatttccggtattagaccaattaacactgtaattcccgccagacccattgacagcgtttactataccgcccccatcagtccaattttgccagtagtctgtgctagctgcagaggcggttgccgaaaacaagctaatactcattaaagctgccgataatccaactaagaaattctttttaaacttaaacatatgttacctcctataatattttttccgactttgaggtagcactcgtatacatttaaaacattcttaattactaacgccaatgcttttgatcgtccccttcagtataataacacgaattcacgagtgaatattaaaagtatttgtaatttaattacaaatacctagaaacacattataagtggtcttcttccaccatatcctgatccttttttcgtaggatcacaattcttgtttctaattcagatggagtaatatctgcaatgaattcccattgaaccatttcaaataaaggagatacacattagagattgtgaaattattgtagctgccgcttgtctaatgaagggaagcaaatttatgaagaatatgaagaactgaagaagaaaacaattaaggttatactaagaaagaactgctcaattagaattattgaccaaaaatttgaggatgatagcttagatcagttttacaaagaagttgcaagatttttatttgaaaggactctgaaaaagaaaaaaagaattgacaatcagggtaactgtgggatgtaaccgagcctccaattcaaaataaaaatctttaaaattcttattttatttaaagagggactgtatatccctctttaaaattaagctttagattgctgctgaaagtaataaaaattgtacttttgatcaaacccttcttcgctaccacaaagaaaaataatgaattcaataaatgcgataatagaggggataccagtccagcaaaacaaaatatatagaataccttgtcctactcttcccaaataaaacttatgtattcccagacccccgaagaaaaatgctaataatgccgctacaattttgttcttcttgcttaccatgacttcctcctagctcattgctgccatttttaaaataatgctttcacattataatgcattttccaccagaaatcgcgaaaatttagaaattcttttgagatttttttatttaattgagaaatgaaagctcatataattgaactagatggttttgggaggtgtttattcaaaatgtatggcaaaagattacgtcaattacgaaaggcacacaaattaacaatggaacagttaggcgagaaaattggaattgcaaaatcaagttacggcgggtatgaagctgaaagcaaaaaaccaccattggacaagttgattattttagctaaactatacgatgtttcagttgattacatacttgggttaacagatgatcctgatcctaaaatggaaagaaaaaacctaaaagagtttttagaaaaaccagatattcactgggatggatataaacttacccctgagatgttagatcctatacggaaaattttgaagttggttactgcaaacaacaattaaaaagagcccttatgtgggcatttgcataaaacaattattttatctaaatctaaaaatttggattccaagcaaattcaatgttaccttctgttcttacgactaaatctttgcttaatctctctttgttaaccttatattctttgcagcttaaatattgagcttgtgcaatgaagttatcattacttgacattatgtatcttttgcgatcacttttccttccatactctttaaaaatatccataaatataacatctgctggcatcttaccatactttttatcatgcgttatctctggaaagttttctaaatgtctaaccttgtctatgattcgtacaatttccttcttcacatgacttctacgctttgaattcttcatgtagatctcaattttaaaacgttttaaattgtttgtacttgtgtctctgatatttttaacgatatactcttcttccttaatatcgtgataatgacaatgcaaagtataaattccgctaactgtatcatcatcttgaaaattcgcaccaaaaagactattcctacttattttatcaactaagtattgggcatctataccgttttgaatatatgcaataatatcagctgtatcagttaataagaaagaattaatttgtttgtcgttattaaatgtaaggaaaagcctatcggactcaggatacaacataactaatttaacaaaggtaaatataccaaactgaatcaattcattattagaaggaacttcatatgtagaaaaatagaggttgacttggttgtttatttcatccacattcaaaagattacatcttaaattataagttgacatctcgagttttatccaggattgataaacaatatcggttgtattcgaacaaattgactgagcaatgctcttataattctttacattaaattttacaataccggctagcaatccgttaaccagatcaattattttatatatctgtctcttaaattgagaaacacttacttccttacttttaggttttcctctgttagtgaagttaaagataattttatctttctcttttagataagttcccccatggttaatagcatttctaatatctacatcaatttcctttgttaaaattgtacacccttttgaattaagcaaattgactaaagggcctagattattttgacttaacaagtctttatcatctatggtgttaagcaaattcctcaaaaatttatatagattgctaactactccttcaactaacgaattatataaaggcaaatacttgacttgaatttcagtgtctctcggaattatagttttattaaataaattcaatgtactcagtacacgatcatatgatgaaagggctaaaaaaagttgtctagactgtctctgaagttctcaaaaaacaaatcagtgttaacgttcttgcattttacttcatcaattaagttgtaaataaaatctttaatatctttattccaaaactgtttctcctcatcaaatattaaatcataaattaacggaagccatgtcttaggtatatattgtatcccctcaatattttggtctattctctctttgtacaccttcataactaattcactatcaaaccccatgaaatctaatgatccaaatgcagcttcaacgtaatcactgttcaattattccctctcctagctcctcatttaataaaaggattcttttatcttaatagatgttaaatttacactctccccatctatttttaactgtctcactttctaattttaatttgaatatagctttaatagttcttccactggataactatctgttttatttatctctataaaatattctaactgccaattttgggttttaatagcttgtttgctagtgggattctcccatctagggtaaactcgaattgccatttttccttttgtgtcggatgttttaaggatattttgttttacaagaacttcttttggaaagacaaattgtccgaaattattatttctagtaaaagtgttgataaccaataaatcagttgccttttcatatgaaaaggcttggtttttaccatctccatctttttcccaaaaagaaacaaactgtcctatcttgttaggtgttatttttgcaactctaaatcttaccgattttgaatttaattgaaacatacccgccccatagtctgaattttgagcttcttcctggatagcatttagggttaagcgattaggtttatataaaactttatttacatatgttaacgccttataaaattcattcaatgctttgtttgtactccttatttatcgttgtattgcaacctttttcttatccatcttactcgacccctttcaaaataaagtaaagccaagcaattctgaattatttttatttctttttttgactcttaatttaatccattcttcatcatcagaatatggtttcttggttgttctataccatccgttaaaatgagcaactaactgaatcattattttctcagcttgacctttagagtccatccctaattgtgtaaaaccatttttactacttagcggatctcggtctcctggcttatcaaactgtttaagagctatgtagtatctcctgagtctgtaccaaagagttatagagccaccaaagtgatcccgatagtgattaacattaagttttggtttatagccctttgactttaaatattcggcaatttcttcagcgccaaattcttgacctatttgacctctttctttaagcacattctaaaccccactctgaataaaatgattatttcattactattatactacaattttccatggtcacactaaacaaaaagcagtctattcagatctgctttttattgttttcttcttttaactttttgtttattttgaacccaattaagatattgaaaatagctgctggaagatataaaactcctgcacctattattcctaatgcagtacttgagctcactataaatgtctgcatttctgtgtttcttgacttcaagcaaagtaatactaggaggccagctaaaccccccataagccgtgcaatacctggaataaagaaatctgttaggactccaaataattgccctataattgatagcataatccctaaaaaactggacaataaaactaaatttttaatgtcatttcaccccttttcaaagtatatcatcgggctcgtcatggtcaatcccatatttgcctttgattttctcgttcccacaaccaggattcttttcgactcataacgagctctcactagctgcgctcaatgtttttggtaataataggattttacccaatgataatttcttcccttattttcacaccattcaataaatccctttgattgtttttctgtaaacaacacccagtcatttaacagatcttgataatagttaagtgcttcgttattgttatttcttgtttgttgacattctaccttgttgtttaactgtattgacttaataataagtgctgtatcttctttaatatcgccaaggtacaaatcttcggatatatgatgaaatgaataccaaagtgcgttcaaatttatatcgattagcgttaataaggataattgttcattgctgccaccaagtctaagcgcattgtgtaagtaatcgacacgtttttcagtatttaaaaacacgccataccacctatatggccttggatcttccggattactcttcatccatccctcaagtaaaggctttaaaagttcctcttccaaaggatgaacgagtacatggtgaatatcatctgatgtttcaaataaatcaaatagccaacatgcaaacttctgttgggcattattatcccatatctttgcttcatcaataaaagaagataatgctttaaaggattccttacgtaaccctttttctttgagggagcagaacttttgaaataatggatattcatccaatctgtcacttttcaagatattagttaagatatttaccattgctcacatctctcttcgtttagaatcaagtccatgttatatttagcctttgtaccttgctatatcactaagaataacttgatttccattttcctttttctacacctggatgcatttcaaaatgattttaattgaacttgaaagtgatatgtacaataaactgagttgctatcttcaactataaagtatgtatcttggattaagaaatttgtaaagccaactgttttgagtatcgctttactcctcatgagcatatccatctggatatcattatcagttagaaggtccaaattaatagtaaacgctgtatgtaattcaaagaaagaattatcaaatttaaagtttaagattttcagacaccccccccaccttaccgtttcctttattatacagcgtgatcttatctaattaaaactgctgttttatacagaaaataatgtcctttgttcctttccctctcccgtccattgcagatgctagccacttcatagtttctttaatatagttttaataataaaagcttcatgaaaaaaggtgattttttgcccgcttgaacgccccctcaacatttttaaaaattccatgggcgtttcagtacattctcctttccaagtttttgtttcattgcctaaccattctcccgggtaacgtctttttcagatgacactttaatctctccattctgtgtgaaattgttgtttacttaattagatgccataacaaaaaaagcttcctaacttcagatgctggtacgctttctttcttaatatatgaacataaaacgactacgtgcattctcttgtaaattcaacctttctatatttagaaattttaatattcgaaatttatcctttccctctttacttatatatggaaaaaagtattatttacctaaatgaaaaatagttaaaaacgtagcagaaagaggttattaaatgaaaaagttatttgttacttttcttgtgctaatctccttaaaaagattgcactagtaagtattctctagctaccttgtcaaatgatgactgcaaaacaagctggggactatgtattgtgttcccaagtaaagaagttaaactttattctccaaagagtcctataaaggtagctgtattagatagtgggattaatagctctctgtctatttttgaaaatagttcaataacctcatatgatgctataaaaaacaattccactacaaaagattctttaggccatgatacagccatagcgggtgttattatggctcctttaaataaacaaacagtgcaaggaatatctcctcaagtgaaattattcgatgttaaggttcttaatgataaaggaggtggtgaagtccactctatgaaacaagtaaagtctgaatctgaagaatatgtattttttgagcctattttatgtaaggttaagcataaatttaagactaagcacggtaaactccgcataccttccttcgaatcctggagagtgtaatctctccgttacataactccttagagcctagcttttaaaatccgagtaaaaatttagtacatggatcaattagttgctatcgaataagaactttagtgaattaattgctcatgtcttttataaatttgaattgtccttttttatctaattctaaaaacaaatcaatccgattttgtgaactacttcttcctctaacttcactcattcttcactcatttttgcttgaaacatttcttctgcagatacttcatgagctttagcgatccaataaatatcttttaacagtttttgtgcattattatatgaccagattgtgtatggaaaccgagtttgaattacagcagtttcatcatctggagttgctaccgtatatggtaatgacctgtcaaagatctcagtgtcatagtcataccacaaccagagcatgtcagcagtattatgtatgtaatatcctaagtactctcgttgaaagttcatctgttcactcactgcttttaaatagaataactattttataatctcttcttaataccctccacttaaaatacagtataattgtaacttggatacactaatctatttacatataattacagtgtatttcattaaaaaatcaggagatgattttattgaaaattaaaaaggttattacaagttccctcttattaacgtctttatttatttccgctgctaccgcttatgctacacctgctacctctgttaaaagtcaagatgctatccgaatccaaggagatcaaatggaaatgactgtcgtgagatactacacccaagaagaatcccgtagtatcccttatacgattcaatatgcagagaatggttggtacggaaccttgactgcaactaattggaaacagcaatctgatcttagagttagagttgaatatacagggactgtttacttaggacaataataaatgaggggcgactagtcccttatcttatttttagttaaaaactatcttttattcaatctctatattcaacccagttgatctaactttgatttccctcatctctccaatctgtggcatatataaatgtttcttttcattagaaacaatttcacccttccaacaaccgttttgcacaaaggattttgtcccgattggtaaagtttgaagatctgcgttctctatgtattctccctcctctctataaatatctccttgttcagaaatcctccttttcgaaactttaatgtcgattttgtaaagtgaattttcatcctcaatcattaatttatatagccaatcagttatttttgattgctcttcactaccgttaaccatatcgaaaatcttcctgtacatgtcattcctcttcttttgaaaaatacttgtctcacctctttaatagttaaagtttcttgattttgcacttttccactcattaactatccacttcatatgtattcattaatttaatgataaaaccacgattttaatttaactttaatatgcaccatcttgagaaaatcccctttaattggtaaactcatacttaactttttatatacaagtgggtgttgccttgaataaaacaatcggaattgttggattaattatcagcatactagtgcaaactttttcggccgatgaatcgctatcgcataagattgctacggctttgttattggtatcaataatgatttataattttgaacatgctaaggattattctaaaaagtcacttgttattttaggagttacctttattcttttgatgctaggagtttatcaactgctctcatttaccagcgattactttgaaaagcttaatgtgaattttagatataccctcttatttgaaatagcattaattattgcattggtaacgattgcagtaaatgtaatgaagtacattgcgaatcggttaaggaaatcgactaatggtaaagagttatagctctttgccttttttatgctaaatgcttctttctatgcggtcttttatgtatgaaatcaaatgctaaatcaacttttctctggttccctttcctctgttactcgctgagtaacaacaataagttgaccgttttcttgacgatcaatactcttaactgaatatcctttagaaccgtaatattctccgataatctcatcaacgtggttactaagcagattcctctttatcacctgaaaaacctccacttattttatttttattctttattttttttatgatttcatcctataatccatctctccatttgccctctcctctatcacgacattaaccgacacacaatttccatatatatgggagtaatttcgctatttccccaacagataaatccatataatgtaattgtaagaaaaaattataagaatgggggatttacatgagttacaaaaaagtaataacaggtgttgcattatctgtaggtttacttgtttcagcatctccagcgttcgctgcaagtactagtcccgataaggaaatagtaaatgttgcaagtgatgattttaaagctcaagctatcaaatgggatctacctagtactactggtatttttgccaatacctttgaaaaagacggtatccgctggtatttaaaaggtattacaaaagtctcggaaggaaattggattggccactatgaaggtgtacgaatataagatcaaaatgggggggcatctagctccctttttaaattcatagtttgccagctctatctggttaaagtaatccttttaaacatagttcaaaagcacataccaattttgtatacatccccattaatacatctccctctctttaaaacagtctttttatcaagtgtagtgctactcataaacaacaaagacattatgatcatcaacaaacatttcgctgccatcagacaagtgtatccaaaaagcctcctctggttcatctctatagtcataaattgcgactacctttgtatttgattcttcactcactgactttctgacagttatttttatattatcttcaggcaaaataattgatttaatcattcacttcaatccaatcaaggtttgtattgcaccgttgtgcttcaagtaacatctagtcacaagattgaaccttattcgttaatacacttggtcccaacttttctgttctagcattagaaagacgcacttgaactttaacattcttcatttcggctgtaattgagtcaatccttccagcccaactaggactgtcttcaggtgtaggataaagtttaaatcgccaactaatctcacctggtttagaagcaaaaccttcgtaggtatcgtaatttccatatgaagatggttccggaagatgaacagcaagaatacttatattggttcttggagcactaggcggatttaattgcaccttataaattaatgccacgccttttacatttctaaggctctgatcaacaggttccattattacactacaaggcattgtacttgcttttacttgaattggataggcaacagcagcagccaataaggatataaccaaaataaatcgtctcatggagagttcctcatatttttttggttaatttcccttatttctggatcgattattcatatgtatttgatctggacttcaattttattttgatttaatttcaacagttaaactgtctggatagttttttaaatcaagtgcgtttacatgacagtgacctacattttcttctttatcaacgtaattatagaagaacttttccccattattgatgatgacttcgccatgatgtatgtactccatctctgatcccttgtaccaagttaccttaacctttgtgctaggtttgattttatttaaatcaaatactgttatttcttttagcaagttcatttttttaacctcctcttctcttttacttttaatctaattccctcatgtcctcctgctgctcaatataacttttaaagtcctcccattccctatcaatttctttaatattcctagcaatataggtttctgtaatgtctggatcaaccaacttttgaagagaaagttggtacataaattcaatctttgatactgtttctagaaatgactgggcataactttttgctctatttaagcgatattgactcattccatgttttgattcctttattattctcactcccttttaatcacattaaaatgcagcttttatttagacttcatcagcttgtctaatagtgtctaacaactctttcttcttgaaatatgtctttttccaaacgatccacttccttttgcaattcagtagcagcagcattcttcagaatccattctcctactccacagacttccttttgttctttctcaaacgtttttatatgttgatcttcgaacctaacccttactcttgttccgttttcaaattcattattaaaagcagctgctttcttttattcttcaagctgcttaatccttttgttgttgttaaatgagttacttacaatatttcctgattcacgagtagtacttataattaataatggaaagcttatatcacctttaggtcttaaaggtacgttgaggttttgactcggttagtaacttttggagaggagttgctgaccatctttttcattaaattaattgcatacagaaatttaataatggaggaatttagattgctgcttaatgacagagattgctgcttaatgacagagaacgttttttgcttgagtatcttcttgtttctaatcggatcaaatcgtcgtttgataccttctaatatactcactatctctgtcttttcttcttcaagaaaagctccaagaaaagatccttttgaaaattctggtttaaaggatctaggactatctatgagctcaccatttgatacaaatatactcagtcttatgtccttcgatgtcttacggaagaactgtttgataaggctagagctctacatagaaatatcggtgagcgtgtttactttttaaagtctgacgtctgcattttgtatcatgagtggatatcgtgacatccatttgctgcgacttcttttcaaatgaaatgaccaccgcaaaagaacagattagcaagcggttgtactataataaacacctaatggatacttattttaaaggaaagattgaagagcataatgtcattacggattgcgacattgataaggtgttacataagatgtacttaagatttggattcagagagtataaacgaaacaattatgagcatgtctttgatcttttgggtatataataagtcttatactgctttttagtaacaaatattggatttcgagtttttttcggctgactcacaaattcgaatgaaaatcaagggcaaaattaaaaaaatgaataattaagagggtgtataaggcttaatattattaatcgttaccgtaacagcaaaaaatgaatcgaagacttatttttatgcaaattggcgaatatcaataacgtcttagtcataatacttaataacctaaagcaaaggctgaatttatgaaagggttattttagatgggtacatataatagaagaaactcgtcacagataaatcatttagatggacggtgaggaacttaaataagctgcagaaggaagatatgaagttgttcaatatctccttaaaacaaccactttcccctactcccgcttatgttttacgatcgtttaccccctattcactaattaaagtatcaaaaatccttatgtttactgtcttttttagctcattataaatttttacgataagcatgttattcgtgtacgatatacgacttgactgtaattggtgacgatttaacagagatatttaatgcacttctaacttttttaactgcaatgggaatcattgttgacccaacaactcaaggtatttctgatagtgaacaagcaatggattatgataaaccccctccccttctcttaattgaggagggtatttttttcgtaatgaaaaaattgcagaaaactttacatccttttacaattttttcaatgactatgttatgattgttttcgagagatttttgaaattttcagaaagaggggtttggatgagtaagatcgcttcagaagttgtcgctactacactgaatgactggtacattgctataaaaaagcaaaaggttgatgagtcaataaaatattattcagagataaagaaactttttgatgaaatggaagaagatcaagaagttcttgcgtattatagtttattagaagaaagacataaaatgttgctacattcctcacgaggagaacctttgcaaaagcacacctattttactgaagacaatcaaaacttcattaaaaaaacaaatgataaattagaatacaacttttatctatttgaagcaatgtatgaggcatacaacaaaaactatgatcgagcaattaacttatatggattagctgagaaaaagcttgcagaaattccagacgaaattgaagcagctgaattttactctaaagtctcttacttatacactcttgttaaacaaagcattgtggcacaacattatataaaaaatgcaatttcgatatataagcgacaccctgattacaaatgcaaacttgctacatcaacaatgattgcagctgcgaactatgctgatatgaaacgatttgaggaagcagaaaaatattacttagaagcaattgatattgcaaaagaaacaaaagatgaatttttgaaagctcaattatttcacaatcttagcatcgtttattctgattggaataaacctgataaatgcatcgaatctcttgaaaaagcaataggaaatgaatcttggttacattcaatttattatataaattctttattcatgataattaaagaactctttaaaattgacgaaaaaatgaaagccattaatttttacaataaagcacaggaaagactcatattaatggagaataaagtatacgaagccaaaattagcatcttatacaacctttattgtggtgaattaaaaaataatttcaataattgtattagtaatattgagtttttaaagcaacaaaatgaacttgaaagtgtagatgaattgtcctacatagctgcaaaaaggtttgaatcaataggtgcttttgaagaagcaacgagctttttcaatgcgaaaatttgggctgaacagaaaatgaatcaggtggagggaatcttatgaaaaaacttgtgctttgcgtatctattttagctgtgattttaagtggagtagctttaacgcaattgagtacagattcaccatctaacatccaggtagctgaaaggcctgtcggaggttaaaaaaggttgattaattaatttagccctactcatacacttgagtgggcttttattttatgatttatgtccaccagtcaacccagctctgtgaagcgctgtacctgcaaacgtaactgagatatttctcactgttttgcccgagtaaaacttattaaagaacatcaagcaacacttataaatatccatcgtgatatttgtgggaaaatcaattgttttggatcgatgaaatccaccaccaagctcatctttactgtaaccaattccaaggctgatcgttcgaccaactttattatgtgtacatgcccttcttgcgacttcctcacaaatttccaaaagaacagccttaatctcttctctccttgtataatccctcagtaaaatctgactcttatcaaaactaatctgaccttgcatcaactgagcacctatttctgataaatcaattccatgcgcatgatagtacaactggtttcccattattccgaacttcttttcaagcagctctaaaggaaatttagctaactggcctacagttgatatacccatccgattcaggtttctttccatcctccctcctattccccatattttagacagtgaaccttccagagtttatttggcacatcttcatatctccaacgtgcaataccactctttgttttcttactctccaggtcaagcgcaagcttactaagcaacatattgtcaccaattccaactgtgcacatcaaaccaaattctctccacatgctgctttggattgctttggccatttcttcaggattctcttttcctgcatctaaaaaagattaatcaattgaatacgtgtggacacatttttcaggaacaaatctgtaaaacagctttgtaatctcagttgaaactctgatgaaaagcttcatttgtggatttacaatgtatattcttggatcttcaggtatctcaaatagtctcgatcctgttttgattccaaaatcttttttaagtgcaggagatgcggctaatactacacttacctgtctctcgatatttcttacaacagccgatacagaagtataaaacacaaagtatattcttacgtagaaattgtgagtaatcaatcattgtatgtaactccttgttatatatactgtgttgttatgttgatctttaacgtgaagcttgtgttgttcaaaattaatgtaatgaactcttccggcggcattttcaaacaaatccatagttgtaaagtttgaatttcaaaatttaagtgcttcagaaacgagaacgtccatcatctcaatttttgatccatcaatcaaatcttgtttaagctgtattaaatgttctagcatcattgatgtccattgattgttcctcgatccctaaacatatcgactcactccttgattgatctaatatcaacagaactaatgttccttattcaatgcagataagaacaaacgttcgatgtaaatgttggtaataaaatataaaggtcaataatgatatccgtagtattaataaaggagagattcttttcgacgagggagagtgtgatggtgaatgaagaagaggttaattggatttttggtcttagttcctgctttgattatgtcgggtataactttaatcgaatcaaacaaaaagacccctgtagaagttttagaaagtgcttgggatgaatttgggttatttagttttgaaattggaataacagatccggcaattacaataggcatggatcaaaccaaaagtgaagcaaaacttcgtgaatatttaaaagataatctgtctagagaagccaaggaaaaatataagatttatatattcaaggacgatattgttaagcttgagaaagagcatcaagaatatttgcaagaaaataatctcaataagtaaaacgcccagcacttattgagctgggcactgtttcatatttaaattgaatttttataagcattaatagcttcgtttcgcaacaacatattatttttgttaaccatgcctatgttgtaagcttttttgataatatctaatacctgtgaatctaatgcagagagattacctcccggattaaatcttgatttccaataatctaaagacttatttaggtcaagtgagctttttttgttctcgggtttaactacttcatttttctcaagtttttcacagaattcactaaaactaattgatgaaagagtaggattatcccctccatacccttctgtagccaaactgcaaaatgctaagaatttcggatcataaataagatcgcttgagtttacattcatcacagataatcacaatcctctcagagctttttataattgtattaccttttccatttttacacatgttaaatatcgacaatccctcaaatcatttaataaggttatgtcaaattttaatgttgataaatacgcaaaaataaaaggaaaccatagttccaagtaccttttaggctttctaaaccaatttttacagcgtttagtccctttttgacaacagttgtgtttgaacctttttctgtcgtgcttttataagcatttgaaagtttactaaaagttgactctaaagatttaatggacaaatcttgaatttcttggctaacaatcttcatttacaattctcacttttcgttttaaaaacaacacctactcaatagttgaatttaggactacgccttgaattttgcgattcgcaaactatcatatcagctacagctttaaatgtttttcttagcttcaccatttgtgaccttagtcccttgtactctttggctcttttatccgcttcagagagcaatgaatcagcttcaaataccttcatttcattctcctttcaagcctactctatgtaaatttcaccacaattatttgcttgaataacagaaaaagacagccagaactgactgtcttatacatcgtgcgatcgtgttctataataattttctgcggtatagtagcaccattcccaaaaagttgccccattggattctatataccgatctagaaatatctcaaaatttaaatttaatggtgtatattcccctatttctaatataaaaagatagttgggatcccctttatccaatttatctttgtcgatcatcaaatggcacccttctaataagtgaccaattgggataccattgatgccttcaaacaaatcctcatattttaattcttcttcaatctcttcaaggctaaataaataaagtcctccacctatattctccccatcagaaagaatttcaaaaattttcgcaccgttatgtagtgtcatgaacttctgataatcctctggaagggtaatctgatgtttagcttcaaaactttgaatgtcgttaagggttgctttgtcctgtgaaaatgtaacaaggaactccatgatatctccttcagaacaaaacaattgaatggctcctttttcgtctaaaagacttttcaagccatttacagtcttatgaacaaagttagtcacatacatcacccctttatttccttttaacaataacctttcaaattccaaaagatgtgaacagatcgtgataggtgctcttttcagtgaatataatgcaataaattctaaaaagaggtgcctctaaaaattgaattctctaatgaatgatgacatggtaaagatcattagaaatggccttagcgcatcccagcatccaaagcatattcttgttgtaggagctggattgtccgggcttgtatcagcatcattgctgaaaaatgccggtcacagagtaacgattctcgaagcgagcggcagagcgggcggccgtgtctgcactttgagagctccctttagtgatgatttgtattttaacgctggcccgatgcgcataccgaataaccattcgttaaccttagaatatatcaaaaaattcaaattgccaacaaatgtatttctcaacagaaccccgatggacatcatttatgcaaatggaatcaaaacacgtctccaagtttttgaacgagctcctggaatattgagatacccagttgcaccaaatgaacaagggaaaacatctgaagagctgatgctttctttactgcagcctattctaaattttatcaatcaaaatccagcgagaaattggcggattgtcgaagaacaatacaaaaatcattcgttaagctcttttttaaacacgtatttttcatatggcgcgatcgatatgatcggtgtacttttggatatggaagcgtatatggggatgtcccttgttgaagtattgcgggaatctatctttttttcatcgcccgctcacttctatgagataactggcggcatggatctgctgcctcacgcgttgcttcctcaattaaaaacaaacattctataccatcaaaaaatgatgaaaatttctcaggggaaaaatcgtgttacgatccattgtcagcatcaacaaacggcagaattcacatcattcacagctgatctcgctattgtaaccattcctttttcaacattgcgatttgtaaaagtcgaaccataccattcattctcttactataaacgaagggcaatccgtgagctaaactatatcagtgcaacaaaaatcggcatagagtttaaaagccgattttgggaaaaagccgggcagcgcggcggcaaatctattactgatctaccgattcgtttttcgtattatccaagcagaaatattggagcaaatggacatgccgtcattctggcaagttatacttgggctgatgaggcactgatatgggacagtctttcagaaggagagcgaatccagtatactttactgaatttatctgaaatctatggtgatattgtgtggtctgaatttgtgtctggcacttcttttagctggagccagtacccgtattctgcggggggatttacagctttcgaaccaggacaagaattagagctgtatccctatattcctgtccctgagggcagagttcatttcgccggagaacacgcctcactcactcatgcgtggatgcaaggcgcgattgaatctggaatacgtgttgcttatgaggtcaatcgcttaccttagatcatgctcacatcttgttaaaactggttgatataaaaagaagtgaagaatttatactcctttgtttaaaagattaattcaaatatgggatgtctcaacattcagttctttattatttttatacacgttttgaatgcggacctcccttttcttccataatcattaataaatacccaaccatagaaaacgttttaattaaccatcgggcgaactttctttcactgtataacgattcttaatgttgcttttttatcctttacttgtcctctctttttttcattgacttacatttcttgaaaaccagtataaatcctaaaggaattttgtaacaaatacagaattggaaagataagcgccaaaagaaatgctaactccttatctcaaagacaaaactgcgcttatattaaaagaaagaggtgtctttagaatggttcattttaaaaactgccctgatccttctctaaacgccaattctcagtctcaccccgaattttcatccgaattagaacatattaagacaagaatgcaaaactttattaagcactcggttacagcccaaaatatcgaagttactgacgcaagggtgacggccgaaggagaggtcacctctcttttaaaagaacgtctcgacaaggaatattataggcttttatctaaaatcacccgggaagtaaatgtggctgacttcggcgctgttccagatggaagagacaatactgaagcttttcgaaaagcaatcgggaatggccgagtcaaagtacatgttccagcgggagaatacctcgttcaagggattaaacttccatcttggacaacaattgttggacaaggtaaagggatcacagtgattaaattgcatgaagacactccagcgcatgaatgggtgattacaaatgatgattatcaaaatggaaatcgcaatatttttgtccaaggaatgtcattagactggaatccaagtagacaatgcggtgtgagaaatccagggggacagttctccagttgtttaacttttgctaaggttgaatatgggtggatcaaagatgtggaagcgattaacgcaggtcttcatggtattgatattacatcgccaacgtatgaccatttgcctgataccgattggacaaaagacggatcaagatatatttggatcgataactgtgtgacatatggttcaggagacgacggcattaccacccattatagcgaatacatctttatttcaaactgccattcaggaaatccgcggggaacagaatttgctgaaggtgtttcaaactccaacggaatagaaattgacgacggctctaggcatgtgtggcttttgaataactttacaagcggcaacatccgcggagttgaagtaaaagcccatgaactgtggccagcctctcaaaacgtccatatcataggccatatttcttatcgcgatgttcgtgcatttgatcttcgtcatattggtcaccatcaaattacagatcctgaaagcacaacagcatacgatgtcacactcattgattgttcagcagttgaaccagttttcaactcgctttacgatgctgtgaccccaagagcgctggttatttcggcatataaaaacgttaatgtaagcggattcacagcgattggtgatccagactatgattataaagaaaaccctgtcgtagccttgcaatatcgcagccaaaatataaccattaatggtattaaaattcgcggttttaaaaaagccggtgttgatattaatttatcaggcggatcaaataaaactgattatattaaaatttcaaattttgatatttataaatctgctccaaaaggaatttcaatcggtggaggcctctacaatgtcaatattctaaatggaacgatgattactgacaatgggacagttgcaattcagtcccccaataatcaggccacaattctcggtgtacaatcagaaggttatagtgtggcagcctcaatcaaaggccaaacataccaacaagttccaatcaatttgaaaggaggcatacagcttgcaacgacctctggctttgccgttaaccaaacaagcgcagttatagcaggtaccggcgacattacggcccgcggagaaagaaatgcggtcattagctcttctggaggctccagtactgaaggctctcgcgcattaatcgcttcttcaaataacgcacatattagaggaaaccaagcgtcaagaacaatactgtcttctgaaaatattatacttgaggaaccatacaccgtggcaggaggtcatcaatcaataaagtggcttcttgactctgttcggggaaacgggacgtttgccggtgcaatcagttcttctttaggtggatatggagagtattttgagagttcaactggacagttaatccatactggtacaatcgtgactttaagaggtgaaaaaattgtgcccgcgaatgttggagattatatgcttggcgttatttcagaaacttcagctttcatttcaggagcctccagtttcgtctggcagggccgttatttgacaaatgagttcggcggatttatttatgaaacggtgactgatgaggaaagcggtgaactcatacgtgttcccaaacaaaatccagactacgatacagcgctggaggcaaattatcattcacgggcagcaagagacgaatggcacgttgtagggttggttggccaacattatgtgcgtattgacgaaactgtcaatcaaggagattatcttacggcacataatggaataggaacaaaagccactgaaggaagctggaaagtaatgaaaataacctctgcttacacatcagaaaaagggtatggtatcgctctaaccgtcatcaaatagtggatacgccgaccagttcaatatatgtttatccaaataattagatctcttttctaggttctttattccttgtatgttattatcaattttcaatatctaccaaaacacccctaatatactatcgtaattaacttatattataatcaaaaaaattttgacagctgttccttctcgttattcatgaaagttgctattgaaatgagtaaatggatatcatattagacttctatagcaaatacaccatatatatcctttaagtatttacaaattgaaaatgtttcatgaggcttattaaaagtattgttcttttatcatctgtaagtcgatacaaattgcattaagatcacacctaaatcacactgagttttttcttacaaaaaaatgaaaaccctttccattctaaattcatttcaccgttactaaaagtaatccttgcattccttcgcccttcatgctatattcatatagcgatgagctgaattgtgtaagtcgatgtacatgcctttacggcacacacgaatgtggcgtgtggtgcatcgcctcaatacgcaaagacgtttgccttaggcaaacgtcttttttgtgttatccgatttttgtgccgtttgaaacaggctgatccggctgcaaaaggacgacatcgccctggccgggtatgccgccgaggaccaagacttccgatttaaatccggcgatccggcggggcggaaagttcacgactgctatgacttgcttgttgacgagaccttccggctggtaacgcttcgtgatctgcgcgctcgattgttttatgccgatttctgtcccaaaatctattacaagcttgattgccggtactcttgcttcaggaaattcttccgcttttacaattgttcccgttctgatatccaatttctcaaagtcttcaataactgccatatcaataactcctttttctcctattgtaaaggagatatacaatattcttttaactaaagagccatcattttttatccgaatataaggtgtttcgatacaggcggggcggcattcctgtgcttttcgtgaaccatcttgtaaaagaagaaaggttttgaaagcccagcgcctcgctcacgacggtaaggttttcatttctctccatcagcattcgttttgcttcctcaaggcgaaggtcggcaatatagttctgcggggacttccctgtctgttttttgaaccagcttgaatagtaagctgggtgataatgctcgatttctgccagcttcttaatcgtcagccgctcaaataaatggctgtgaatgtatgcaattgaggcatagctatgggattgaagcttttcttttatgtattgtactagcatatgaagcgagttggctgttccggcctttgcttcctctgtcagcaagtacctgatcgaagaccagaaaggatcgagtgcagcttcaattcccgatcctgcacgatactcatcaattttcattgcgtgaagcggaacatccagtacaagacattcatttcttccgatagaacggaagcgatgctcgcactgcggcggaatatataaaaaatgatccggatttaatttcacctggcgcccctcagtctcaagatctatactcccttcaagcggaaaaagaaattggctgtacgcatgcttatgtgaatgataaaggcgtgtgtatgtccgtttttcgcaaatcatctcttgaagcgaatccatcagcaacccccttcctttggtcatcttttaatccggtaatggtgttccgatataggcgaaaatccgattttttcatataaagaaactgccgccagattttctttcatcacttgtaaaaacatgcgttccgctccgttgttttttgcccattcagtcaacatcctgatcacttgggttcctgccccttttcctctgtgctcctcagctacaacgatattactaagtccgccataaccatcaatgacagaaaccgtgccaagcgctgtcaggctttctttgtcatacatcttgaaaaaagttttacacggcggcatgcgttcgaatatgtgtttgtaacctttgtgacgttcgggtgaaaacccttctaattgaataaattcatctatccaaacagatgatggctcttgttcccacttgtatgtaaatcggctgttgtcatttgttcggctcataattgaccggcacaacgctgtcatctggaagcactcgtctaccttttcataacggctgtctgccaatgcgtcatcaagccctttcggtgatgcgttgctaatatgaaaacaaacaggtaagcctaaactttgataaaaaagttcggcctctagctgaaaatccccttcaggcatatccgcagacgtccatacgctatttgcccttttggttacgccaaaattcgctctgagaagccatttccctatgcttttttgaaaataagccggccatgaagctgccgctaatcgttcaatcttgcgaatgtcatccattgcataatgcctctcccctatgtatactcccttgatattatacaatattcagaaatataagacatccatttatttgtttacataatatttttattgtttattaataatcctgacaaaaatgtccgaattgaaaatgacaggctttctaaaatgtcctcctcacgttcaaatgcttcttttgcgattaaaacagtaaagccatgcagcagacttctgagcccccttgtcgcatgaatggcagtcttttcacttgcatagccgttttcaatgagcagcttcgtcacaagacagacaatttggtcagagacgatttccgtccgtttgtcgtgaaccttaagaagagccgcttcataatatccgggattttcaattgcaaaatcaacatatgcatgagctaaagaaagcatcgcggaatctccctttcgttcggttacggagtccgccatttgatcaaaaagctttgtcagtcctctgacagcaagttctgctctgatcgcttgcagcccgttgatatggttatacaatgacggggggcgaacattcatttttttagaaagtgcggcaagtgagacaccatttaccccttcctgatcggcaatctctgctgcagcgtctacaatcattttttgggtcaaacctattctcggtgacatgctcatcatcctttctttgctttttggatcgcctgtctcatccgctctgaaggtgatcgcaggaattttccatgtccgacagcgagacaggaaggcgccttatctgcgagcaattgtgcacttttgatggcctcctccttattccatgtggcgaaagcgggaaaaggaaacgtccattttatctggcctgatacagcgattcctccgtgcaactgaaacgcatctcctgctattaaagtgccgtttcttgtatcaagaaatgacatgctgcccggtgtatggcccggtgttggaatggcaagcagagaaccaattgtttcaccgcccgtcagcagttggtgaggctttgtttgtatgtgtttcggaatacctccttttataggcgtctgcggctcatcttgccgcaaggatgtgtcaccttggagcaagaatgaatcccgttccgagatcatgacctttgcatgcggaaatgtttgtgccaatgtatccagtgatccgacatggtccccatgtgcatgagtcagtaaaatatgctgaagcggttttccaagctgattcacagcttgaataatccctttatagctgcctggcagtgcggcatcaataagggtgacttcgttttcttcctctactaaatagcaattaaccggaaacaatgctggaaaaaaagtcagctgccaaaccgtttggtactgagtcattctcatctttttattcctcctaacaaaactaatggcgttagttttattattaactaacaccattagtttttcaagagtttattatttttttatcgctacataaatgttaacttgtgctcgctgtggcactgcggcactttgatcatacatctcaaaatcacctgtaaacgtgcgcagatgccgcttatcccaagtccaaatttccttccacgtttcaagcacaatctcttcaataggaccgattctggaagtgaaaacggcgtaagcggaagccggcaaatcaatgttttcatatggtcccggaagaatgtcgtcgtattcctgaaacgttccgactgaaaacgtataaaacccattcgtctcttgttcataattcgaatataaggcaataatgcttttgtctttttcagcctgtgataaaagagcgctcatatcctgcttccagaattggtcccacagtgccggaatcctcctttcttccgtcatttccagtgcgttgcttgtccgttgtgacagtccggcaaatcgtttccggtctaagtgtgttatatgtgaaaagcccatacgatctcctcctttttttaagattatagacaaagaaacctgacagcagtgtgtcaggtttcatatattttttgcatgtgatgaatggtttcttttactttatcccgtatatgaagaggctgcagaacctcaatatcctttccgaactggagcaaaaaaccgatcagccatggatcttctggaagtgaaatcactgcccggcagatttcatcttcctcacaacagtgaaggacatcatatccgaaccattcacctatgcgctgacgtgctgacggctgaacaagaataaccaattcagttaaacggtccttttggtaccaactcttatcccatggcaaagtgtccagctgaatgtcttttctgataaatgtctgatgtaagatagccagatctttcatccggttcagtttaaaaaagcgaaaatcatttcttaccaggcagtaggcatataaataccagtgccccgccttgcaaaccaatgtataaggttcagtttcccgaagtagtgtttccccgcttgcgcttgtatatgtaaaagatatcgttgacaaccgatcgatggcagcgctgattttctcgcgcagcgtcttttgatcctcagtatggccccaagccgtcatgtcaataaaccatttttctgtttggtgcttaaatgcttgagtagattgttcaggtataaggtgtttgattttttgataggctgtgctgtgagaaacgggttcatacatagatgaaacgctttgcaaagcagaagcaattgcaaacaattcctcctccttcagccactctctttcaagccgatacgtttccatgatgccaattccgcccccggaaccctgtgaggtcacaatcggaataccagccctattgatcgtctcaatatcacggtaaattgttctgacagatacttcaaacagctcagcaagctctgcagcctgcacttgttttttgctgatcaataacacaaccatcgctaacaaacgttccagtttcattctgcgcaccttttcttcttgtattttccaacaaaacaatcataacattttgataaagcttgggcatatctattatgcggcggaatacacctcgcatatgctatgaaaaaaggggtttccccttcttttttgtgttcagtatttatttcagctactatttccgaccggataagcatacacttctcaacggaggggatttcacatcatgcatcttacacttcagagcgtttatcctgccatgatcatcatcttttttctgtataaaaaaattaaaaggtccatcggataccagccgctgaagccccgctggctgttcacccgtatcattcttttctcgctgtttgcttttggactttcaatcttcagcgccattcacccttttttatatggatatctcattttgggcattcttggcggatggctccttgtctttttcgctaagaaaaacatctcttttgaaaaacgcagaggaaagatctattttcggactcatatttgggtagaaatgattctcctaaccttattcctgtcaagatttctatatcgagtgacagagctttatcttacctcgcctgatctaaacagccttggatcttacggtcagtcaatcggaacggaccctctgacaataggcgtcttttttctgatagccgtttattatatcggtttttcttcttttgtcatcaagctcagcagaaacgaactcgaacagcacggacacaataaagaaaaagacatccttgcccgctagcagcgagttaagcaaggatgtctttttcaatcatgctgcgtatgatggatcatttgctgaagaacatctaaaacatgttcatcctccggagagtaataaatcgatgttccttctctgcgcgatttgacaagccgaagatttttcaaaaatctaagctggtgggacacagtggattgcagtaaattcagcttttctgcaattccgtttactgcatgctcaccctgggacaataaatggagaattctgattcgggtaggatcagaaagcgctttgaatgtttgcgcgactagaaacagcgtctcctcgtccagatcagcagccgattgttccgtttctctaaattcagtcatatgtatcacctttctttattcatagttttatcttataacaaatgcgcttgagtgcaaaccagcctgcttgtattccatttcaatctcatagtttaaatttatgtttcaaatcaggtttttacttggtctgatataccgtcttatgtcataataaaaaaggtcatactgctccaaacattgagggtgaaacacagtgaagaaaaagagaaaaggctgtttcgctgctgcgggttttatgatgatttttgtctttgtcatcgcctcttttttattggtcctgctttttttcaaccgggatttaatcaaaaaacttccgatcgatacgaaaacgattgttttggaacgtttaaccgattacaaacccttggtggaagaagagcttgaaagccaaggactctctaattatacatcactcatattaggcatgatgtatcaggagtcaaaaggaaaaggcaatgatcccatgcagtcctctgaatctctggggttaaaacgcaatgagataacagaccctcaactcagtgttaaacaaggcatcaagcaatttaccctcatgtacaagaccggtaaggaaaaaggcgtggatttggataccattattcaaagctacaacatgggggcaggttacattgattttgtagctgaacatggaggaacgcatactgaggaattggcaaaacaatactccgagcagcaagtcaaaaaaaatcctgacctgtatacttgcgggggaaatgcgaaaaatttccgctatccgtattgctacggtgattatacgtatgcagaaaaagtaaaagaaaaaacaaaaactgttgaagaatctttgcaggttgcaacacttgaaaccatggaatccaaggctcatgaataagagtctatcaatttactgacaaaagcccaaaaatgaatttgggcttttgccatgtttacacgtaaaaaaagccatactgagtatggcttttaataatacggtgaaatcatcaaatatacaataacgcctgtaaggcttacatacagccatagaggcattgtccatctcgcaatttttttatggcgctccacctgcatgctgaagcctctgatcagcgtaaacagcgcaagcggcacaataattgcagaaaggcagatatgtgtaattaaaataaagaaataaatcgggcgcataataccttctccgccatagagcgtgttttccgcaatcgagtggtacgtcacatagcaaatcaaaaatagtaatgttgttgtgaacgcagccaaaataaagcgtttgtgagctttgatatttttctgtttaatcataatcagcgcggccaataagaagataaacgtaaagctattgaatatcgcattcagcattggcaaaatgtgaatattcgcatggctgaactgatctaatttaggcataaaaaacagcactgcgattaaaccgttaatcagaactgtcagcgtaaggacaatccccgtgtaatttttcggtttattttctgtttggttcatttggtgacctctcctaatttgtactggctatccaaatcgtatgcaaattcaaagaagatgtcaacggtttcgattgcttcgtcagaaattagacacacttcaaaggccggaggctattagccccggcctgttaggtttacgcctcttttatcaaatgttcaatgaccttatgttcattttcattcagcaggttcttttgaattttcgaatgaatgggtttattcatatgctgatccaagatatcggccgtttctttatccccggcaataaccattcgttcccatcttttcgcggcagctttttgatcaaggctggcagccagccgcttatacagtctcgattggttctctgttacatgttccctcatccggttctcttcaaatggtggcgctttgtctacagcggaatggctattcttccaagactcattgatcatatcatactcataacgctccaccgcctcaatttttcctaaaacggtttcaataattttcacttcatgctgctgagttaaaataaacgccgtacttgggtatgcctggcgcaaacccttcagctgatccaggacagctgtttcttcccagtaaaatcttgtatctacagggacttgaagcttaataggctcccatatgccgctgtcggaaacaaaaaacacgagactgcggggcatgtcttttcccattgcattcaagtattgattcattttagccctgattccatccagacacttttcctcctctggatcactagctgccaaatactcttttaatcggctgaatcctgactttagggcaatcttccattctcccccctgctgctctggatctctcatgtctgtattgagatacagagagagaattttatccggcggttccaattggacatactgtaatttgttaatcaatgaatcaatcgccattccgattcctcctttttcacaggttagttttctttttcctctcttaaaaacgatcaaacctgactttccgctaatttctagtaataatggaattgttgtttacaatacgcctctcttctaatacaattggtaactgtgtttctaagctgatttttgaaaggagtttgatcttgtttactattaaagaaaaaaatcgtcaagagcttgaagaagaattaaatgatttagaatttcaaatttatcgcatgcaggagaatatgaaggatttatctaaagatgccaaagtgcttggtattgatcaatcgaaacatgatgagtggatgattgtttcctcgattgatgatggccaaacatgcaaaattatgctaactgattgtaaaacggcttaccgaggaaaaggctgtttttcacttgtagcgtcttacaaggacgatgccattcatataggcgatataaaaggccctccgaatcacgggtttggttccatttgcatgaaatatttaaaagatatagcaagagaccacaatataccgaaagtcacaggagacatcgccaaacgggattggaatcatgtagaccggctgattcacttttatgaaaaacatcaattcaaagtatgtatcgatcatgatacccaatccggcagcattaagtgggttgatttgtaaaaaagtctggaagaaagagccaagatatgctgtaatggtaaaaaaccattgatggagggttctatgtacgcctcaaaactgaaaaagggagacgaaatccggatcgtgtctcccgcgaccagcatgtctatattatcaaatgaagcaaaaatccgagcacttaggttatcgggtaaccatcgctgaacacgcaaatgaatgtaatgaatttgattcatcctctatcgagtcaagagtccatgatctgcacgctgccttttttgatccaggcgtcaaagcgattttaacgacactcggagggtttaattcaaatcagctgctgcgttatcttgattacgagaaaatcaaacggcatccaaaaattctgtgcggctattccgatataaccgctctttgcaacgcaatttatcgaaaaacgggtcttgttacgtattcaggcccccacttctcaacatttgcaatgaaaaaagggcttgattatacacaagagtattttctttcttgctgcgcttcggacgacccgtttgaaattcttccttcaagtgagtggagcgatgaccgctggtttttggatcaagaaaacaggcgtttttatcctaataacggccctgttgtaatccaagaaggttatgcggaaggtactttaattggcggaaacttatgcacgcttaatttgctgcagggaacggagtattttcccgaaacagaacatactattttattgattgaagatgattatatgtcagacatccatatgtttgaccgcgatctgcaatcactcatccacctccccgctttttcacatgtaaaggcgattttgatcggcagatttcagaaagcatcaaacgtatcaatggatcttgtaaaagccatgatcgaaacaaaaaaagaattatccggcatcccgatcatcgcaaatataaatgccggacatacctcgccaattgccacgttccctataggaggaacatgcaggattgaagctatttcgggtacatcacgaatatggattgataaacattaatcagcttgtaaatttttttacaagcttttttagcgcaatcggttatgcatgccgcacgagacatgacaaatgtcatataggaggcatgatgtgtgctactacaaaagacttctctcattagcgtatactgaaccgagacacacaatgagaggatacttactatgactgaacaaaccattgcacataaacaaaaacagctgacaaagcaagtcgctgcatttgctcagcctgaaacaaaaaacagcctgattcagcttttaaacacgtttatcccattcttcggcctatggtttcttgcttatctcagcctcgatgtctcctatcttcttacgttagcattaacggtgattgccgcaggttttctgacaagaatttttatcatcttccatgactgctgccatcaatcttttttcaaacaaaaacgctataaccacattctcggttttctgacaggtgtcctgactttattcccgtatcttcaatggcagcacagccattcgattcatcatgcaactagcagcaatctggataaacgcggaacaggagacatctggatgttaacagtaaacgaatataaagctgcatccagacgaacaaagcttgcatacagactttatagaaacccgtttatcatgtttattctcggaccgatttatgtttttctgatcacgaaccgttttaacaaaaaaggcgcaagacgaaaagaacgtgtaaacacataccttacgaatctggcaattgtcgcgttggctgccgcttgctgtctgatctttggctggcaatcgtttttactggtgcaaggcccgatatttctgatttcaggttcaatcggtgtttggctgttttatgtgcagcatacctttgaagattcttattttgaagcggatgaaaactggagctacgttcaggctgctgttgaaggcagctcattttataaactcccgaaactgcttcaatggctaacaggcaatatcggttaccaccacgttcatcatttgagtccaaaggtgcctaactataagcttgaagttgctcatgaacatcacgaaccattaaaaaacgtaccgacaatcaccttaaaaacaagcctgcaatcactcgcgttccgtctatgggatgaagataacaaacagtttgtgtcatttcgggctataaaacatatacctgtaagccttccgcctgattcaccagaaaaacagaaactgcggaagaatgcctgatgataaaggaggtcttctaatatactagaaggcttcctttttattgttggagggtgcattctggctttcacaatgataaagttacaagtaagatgaaaagctgaaaatgaggtaagatcatgattaaaaatcattttacatttcaaaaactaaacgggattacgccctatatatggacgatatttttcatcctccccttctactttatatggaaatcatcatctacatttgttattattgtcggcatcattttgacgcttttatttttttcggtatatcgatttgcttttgtctcaaaaggctggaccatttatttgtggggatttttattaattggcatttcaaccgcctccattaccctgttcagttatatttattttgctttttttatcgcgtattttattggaaacattaaggaacgcgtcccttttcatattttatattatgtccatttaataagcgcagccgtcgcagccaatttcagtctcgtattaaaaaaggaattctttctgacacaaattccttttgtcgtcattaccctcatcagcgcaattttattgccctttagtataagaagccgcaaggagcgcgaacggcttgaagaaaagctcgaggatgcaaatgaacggattgcagaactggtaaaattagaagagcgtcagcgaattgcccgcgatctccatgatacgcttgggcaaaagctttctcttatcgggttaaaaagcgacttagcaagaaaattgatttacaaagatcccgaacaagcagctcgtgaactgaaaagtgttcagcaaacagcgcgaacttctttaaatgaagtaagaaaaatcgtttcctctatgaagggcatccggctcaaggatgaactgatcaacatcaaacaaattctcgaagcagctgacattatgtttatctatgaagaagagaaatggcctgaaaatatctcattgctgaatgaaaacattttgagcatgtgcttaaaggaagctgtcacaaatgtcgtcaaacacagccaggctaaaacttgccgagtagacattcagcagctctggaaggaagttgtgattacagtgtctgacgatggaacattcaaaggagaagaaaattccttttcaaaaggacatggcttactcgggatgagagaacggcttgagtttgcaaacggaagccttcacatcgataccgaaaacggaaccaagcttaccatggcaattcctaataattcaaaataaacataaaggatggcttatatgattagtatatttattgcagaagatcagcaaatgctgctgggcgctttaggatcacttttaaacctagaagacgatatggaagtcgtaggcaaaggtacaaccggccaagatgctgttgattttgtcaaaaaacgccagcctgatgtatgtattatggacattgaaatgcccggaaaaacagggcttgaagctgctgaggagctaaaagatacaggctgcaaaattatcatcttaaccaccttcgccagacccggttactttcagagagctattaaagctggcgttaaaggctatttgttaaaagacagtcctagtgaagagctggccaacgccatccgtagcgtcatgaatggaaaacgcatctatgcacctgagctgatggaggacttatacagcgaagctaaccctcttacagatagagaaaaagaagtgcttgaacttgtggctgacggtaaaaacacaaaagaaatcgctcaggaactcagcatcaaaagcgggacggtgcggaattatatctcaatgattctagaaaagcttgaagtgaaaaatcgaattgaagccattacccggtcaaaggaaaaaggctggtttaaataaaaaaggatcttggcatctgccaggatcctttttgttaacctgaaattccagtttgagaacctcgccgcaaccagaattaaattgatcgatatcctcgctcctatacccgctgaacgattgcttgattaacagcccaataaaagactggattgaatgatatccctgttaaaatggtcggccattgcacatcagcagaatttctgatattgattattttgtattttcagtatgacaaagttgtgccacttcgctcccgaagctgccatgcccaactgcaagagcttaatatcacaataaaaaaccgtctgaaatcaatccgattccgttccgtaaatggcatctgctacatccaactgcttattatctgccaaaaaagatacaacaccagctcgtttcgctgatcaaagatagtaacaaccagctataaatgtcatgatgccgaatgtctctgtaatgtggaaccaatcttttaacccgagagcccctgaatcgcacataaagagaaaaacgggaccactttcttttatcagcatatgatataaacagctctaagcagaacaaaaaaagacacaagccaaaagctcatgtcttttatcacaatctatattattagtttaagactttaacacttacagttttgacgccccaattagaagcatcacttttacttggtacaaatacgtcgattttatttcctttaatagcgccgccagtgtctgctgctgttgcttccccgtagccttcaacatagactttagaacctagcggaattacattaggatcaaccgcaataactttcgcattcgggttcttatttaagtcaatgcctgtagctgtaacgccggaaatgccgccgtcgttagcagtgtaagcagtagcagtaactgttagttcttttgaagcttcttgattatttgtatttgattgaacagccttctcctctgtgttaacagaagtttctgcctcagcctttgtttcttgtttaggttgctgttgtacagcttcttgtttaggttgctctttttgcacagcctcttgttttggtgcagcttgaggtgcgtttgtttgcgcattctcagtagctgtgtttgctgctgttgcctgaccttttactgaaagagttgatccagcatagatcatgtcagagcttaagttattccaaactttcaggttgttgactgtcgtgccgaatttttgagcaatcttagaaagcgtatctcccgctttaattgtatattgcccagtcgtggttgtttcttctgaagaaatggtcagtttttctcctgcaatgattttatcagaagttaacttgttccattcttttaagtcctttaggttcactccatttttctgagagattccccagagcgtatcacccttttgcaccgtaatttcttttgcagaagcgtgagctccgaatgcagttgttgaaagtgcagcaactgccacaaaggacataatcgtcttcttcataagtaaatcctcccttgttagctttttattggcggctaacaggtgatatcgtaacacacgtaaatgtcaaatcaataacaaaaagatatgatttagattacagttcctttacatgaaggatttctctctgatggaaagacttgctgaacccttgatataataggcttcgcaggtctttttattttgaggcgaaacagagaaaataaaatgtgttttttatagaaaaaaagattgtttttctgtttttttagtctgtcatccttgcataagcttgtatttcttgtaaaaaaagccggccgtattttgctcttttttgttctccgactccttttatagacaaaagttcatcatcatttacgggctgttttcctgacatttcttttaacgtttggtcagagaaaacaacaaatggcggaacaccctgctcagccgcaatttctttccgaaccatgcgcaatcgttcaaacagctcgtcattttcagtaatcgaggccgcttttagcgcttcttttctcgttactgataattctcctctcagcacattccttcctttactgctgacaaaaagagtcggaaacgttccgtctgacatcctgatgaaatcgtcagaaataagaaattcgataaaatcactgatttcccctacggattgatgttttaatatcccatatgttgagagatcggcaaagccgttttcaagaacttttttatttttagatccggcgagcacttgggcaaccatcatcttaccaaagcgttccttcatgcgaatcatacacgataagaccatttgcgcctcccgtgtcacgtcatgagccatccttgtatcagtgcagtttccgcactgtccgcacgcatcaggctccttttctccgaagtacataaggataaaacgctgcagacagtcttccgtgtgacaatagtcgaccatttgcctcagcttttttaaatcctgcttttgtttctcttcatgttctgattgttcaattaaaaaacgctgcactataatatcctgcggtgaaaacaggagaacgcactcgctgtcaagaccgtcccgtccagcccgtccggcctcttgatagtagctttccatatctttcggaatttgtgcatgcagaacaaatctgatatttgatttatcaatgcccattccgaaagcagaggttgccaccatcacttgcagctcatcattaagaaacctttcctgctgctcttttctcacatcatcagccaagcctccgtgataccgccctgcattgacccgatttctttttaatcgctcataaatccggtcagcttcttttctggtcgctgtatagataatgccagcttcatgtttgttgttttgaacatactcgtcaataaaacgatccttattttctccctttgctactttaaaggttaaattgtctcgggaaaatccggtatatacggtgttttctttttgtatgtgcagctgtttgcagatatcctcgtgtacctcaggggttgctgttgctgttaatgccatgatgacaggattgtcatgtaattcacggaataaaatttcaatatttctgtagcttggcctgaaatcatggccccattgagaaatacagtgcgcctcgtctattgcaaccaaagggacatcaatgccctgcaaaatccgaataaactccggtgacgttaatcgctccggtgtaatgtaaaatagcttataggccccttctttaagcccagtcagcctttcatatatttcctgactcgattgtgtgctgttaatgtacgcggccttaatccccgcttcttctaacgcatcgacttgatccttcatcaaggaaatcaacggcgaaataacgatcgtagtcccttcaaacatgagtgccggaatttgatagcaaattgatttgcctcctcccgtcggcataatgcagacggtatttcgtctttcttccgtcaccgagcggatcgcttcttcttggccattgcggagcttttcataaccgaaataatgggccagaagggattgggctctatgtaacataacgtataaacctcgcttttccttgaatttcttccatcatatcataaaaaaacggtcttcatttcttccacacagaaattgaatttttgctataccaaacctttttaaataaaataaaaagccatttcccaaaaggaaatggctttcgctacgtcttgccgtatgcaagtaagaaagttttaaaccaccactcctcaaagtgggtgtttgcagaaacgttcctgtcgtcctctgcaatggaggcatgacattccggcttcgatataaaactccctattacagcttaaaggttaaaacttaattaacaatacgcacaaagtagcttcttttatatagtacaccatcagcagctttttatcaagagaccagaacaattgtttagaaaaactttttccagccgataaaaacgatttttcgctattatatccggagattcgacaagtcaaaaatatattacaataaaaaaacagccttttttcgcaaagaggattcatcactttcttctattataatatgtatacaaaaaaactcctatcgcccaatgataggagtctttgtttcattagaattttgcagcaagatcttttgcttcttgtaaacctttttcaatgatttcttgcgcttgatcaggtgctgcgttatgtccttcgatgacaactgtgtgcaagtcttgaacaccccagaaaccaagaactgttttcatgaagtttaatgacatttcaagtgcagccattggtccttctgagtagacaccgccgcgagcgttaagaagcgcaacttttttgcctcccattaaaccgactggtccttcttgtgtgtatttgaatgtaacgcctgcgcgagacagataatcaacataagtatgaagcactgctggcactgtgaagttccaaagcgggaatgcgaaaacaactttgtcagcttttacaaactggttcagatatttgtcagcaattgctgcttgttttttctcatcttctgtcatttccattccttgacctgctttaaatgttccgttaatcatatctctgccaaggtaaggaaggttttccttatgaagatctaattcaaccacttcatcattagggttgttttctttataagcagctaagaaagcttcgtaaagtttagttgaaacgccttcttcagctgtacggtcgcttgattttacaaataaaactgtagacatttgtattcctcccggtaaactttttatatttacttacaaatagtatgttactttcttttttacgtaaagtcaatcactttattttgaatatgagattttttttcaaaaaaaagcaagtacatctaatatcggtgtacttgcttgccatttttacttcgaatcttgttcacgatccaagatttcatacgtctgcgagcttttttgatcaattgtttctttgttggataagtcttttacctgttcatgaaactctctttcataagaaggagcatctgtctccagatcatcctccacattagcttgagcctcaactgtcattcttgcatagggaacagcttcaagtctttcgtaaggaatgtcttggccggttttttcacacacaccgtaagttccgtctttcatcttttgtaatgcacggttgacctcctctaacagctcccggtcaatctctttcactgtttggtctgtcatccggtctgtgacgagcgtcccgtggtctgccatatggttgtcaaccccgttggaaagctcccccacttcttccgtcattgattctgtttcctttttctcgccagacaattctttttgcatatcgagcaatttatgatagagatgctgtgtttgttcttttgtcagtgccatgtatatcctctcctttctatcctgtttcccgttttgccttctgtcaaacatggaaacatcgatggaaagaagctactgcctttttgaacggatcgtgaccgctggcgtcgatggtgcttcgggttttcgttggcactttttgtccttctcttctggcggtatataataggttgcgcctatatttaatctgccgctcagttcatcaatggtcagctcgccgaattcaagatgatagtcaattttttcgacattcagcgtttcaatatgtatataggtttcttcagactcctgtttgctgctttgtttttgtttctcaatcactgagagtctttcttcacattcacgcagtttgtcaagttctggtttcaagcaaagcctgatcagcgaccggaacatttttttcatgacatcacgaccctttgcatactcctctttcgtctacatatataatgaggtatataccatagaaaggagaggttttcatgcttccgactaacatcaatatttctcatctcaagactaactcgataggcaccggctcatcccttacctttggttctgcggagttaaggaacaggtgctctgctatcaaaagaaataacggttttggggaacaaaatgcagatgttattgttatggtcattccgattgaatcaattgatgaccgtgatggagcagatgcactcagtatgaaaatcaatcatcaataacaatggttttcgcttgaccttcgtctttttgaatagtgatgtataggattccgtctttaaaaatggcattcatctttccatgaagatgatcggaaagctgaattttcttctcaaaacttccgtatttcccttctttttggcgaaagtcctgttcattaaaataggaaaagcgctgccccttcaccactaaataatctccgtacgataatatgtgaacgtcttgtttacggtagcctggaagataaattaaaaactgcacttccgcaacggtatctacaatatccatgctcggaaatgaagcatctcctttccctcgctgatcttgctgcgcaaacggaaacggagattggccatttgtcataaaaggggttttttggtcttcatcaaatacctgtttccaaaagtcaccgccgtacatctgctgtgcgaattccatccactgcttcatcttttcgaaatccatttgaagccccctgtcttaacatactttataaccgccagcatacaactatagaaaggaggtttgcctgtggttcaaccaactccgtatatcaatattaatattttcatgctgaaaattaattcctttgaaaatgcttcagcggttaacgtaggacaaaatttattggcagaatggcaaaattcagataaaaaaaatcaaggctacggacagaattttggagatgcgagcggatttatgggcacgagaagccatgtggatgacagagaccaaattgattctccggcctcttttgaaagtgaagcggttaactcctcaatcaaaaggaagtgatgagatgttcttttcaccctccgtcgtgaatgtcggcggatttaaaatcaatacgatggatcgaggttcctctttaacactcggtccgtatcagcaggtcgattactttttatcagctaaaataaatcaagggtttggagaagaaaatggcgactttactcctcttgtcgtaccgatttcaaatgtattagatgcagatcttgttgattcgaactcagcgaaaaacagtgtggtgtaataagaacagggcgcacatgccctgttttttttataaaaaaaagcctaaccattttttgaacggctggctcatcaaatattcagctgcacaaatgctttgtcagcaccgcctgaacctcgcttaaatcggtgtctttcgcaaattctaattcgaacgttttgcttcttgtcatcaataaaagcccagtgtccggatcaaacattcccgcttcttgaatggcaaagctttcaattgttttatatggaagaaatacacgaaccttctttttggaaaacattttattgtcaaagaaaatgatccgcttatttgtaaagcaaatttggtccactcggagcttataaatcgattctattctttccccttcaacgagcaaagcctcaagcttctttgcgtccgttgatctgctaacagaaaaaatacccaatgaagaacccctctttctgcatttatctatttgttttatcattcactacataaaaataagtcctttatccctatataagaatacgacatagaagacatttaaaccattacgaacagattacatttttcaaatttttgatttgttttttggcttttaagctgttgtcatcaagtaatacgcacatatagagaaaaaagtttcaatattcagcaatgtttttataaaaaagcggtttttaatgatttttttaattttgttttatatttcctgttttaaccacaaaaaaaccgcagctgagctgcggttttatgtatcgactgcttttaacaaaatctgtttgatgcttcaaggaagcattacatctcttcgaagtattctttataatagccgccgactttattcgtattgtcgaccacaaagagaaactcctctgtttcattttttacttcatattcttttcccggcgttaaaacgcggtttacgatatatttttttgcgtttgtctgcacacactttacttttttaattgtttctttttcaagccaatttttatgaatcatgatgaaatctccttttcttatctataagcttattgtagcttttttcttttgtaaattgcaatatcggttattcattgattttgccttgatttctattatagaatgtttgtatacgcttacgtttgaagcaactatcacagcttatttctgctattcaatccaggaatcaatgtgctatcaccaagaatctcagaacagaccataaaaaatgactggaggtttgttacggatgagttctttaacgatgcaagtgacgaaaaggctggagacatttttacagggaacaaagaagctttatattgacggaaagtttgttccgagtgcctcaggggcaacctttgacactccaaacccggcgaccggcgaaaccttgatgacgctgtatgaagcccaggctgcggatgtggacaaagcggttaaagctgcccggaaagcctttgaccaaggtgaatggagaacaatgtctccagcttcgagaagcagactgatgtataagctggcagacttaatggaagagcataaaactgagcttgctcagcttgaaacacttgataatgggaaaccgatcaatgagacgactaatggagatattccgctggctattgagcatatgcgctattacgccggctggtgtacaaaaataacaggacagacgattccggtttccggcgcttattttaattatacgcgtcatgagcctgtcggtgtcgtcggccagatcattccatggaatttcccgctcctgatggcgatgtggaaaatgggcgcggcacttgcaacaggctgtacaatcgtcctcaaaccggctgaacaaacaccgctttcagctctttatttggcagaattaattgaccaagccggtttccctgccggtgtaatcaacatcatcccaggattcggtgaagatgcgggagaagcgctgacgaaccacgaagcggttgataaaattgcctttaccggttccactgaaatcggaaagaaaatcatgtccaccgcagcgaaaagcattaagcgtgtgacattggagctgggcggaaaatcgcctaatattcttctgccggatgcgaatttgaaaaaagccatcccgggcgctttaaacggtgtgatgtttaaccagggtcaagtctgctgtgcgggctcacgtgtcttcattcataaagaccaatatgatgaagtggttgatgaaatggcgtcctatgctgagtcactccgccaaggagcgggacttcataaagatactcaaatcgggcctctcgtaagcaaggaacagcatgagcgcgttctttcctatattcaaaaaggaaaagatgaaggagcaaaagcagtgaccggcggaagctgtccttttgaagcaggatattttgtcgcaccgactgtgtttgcgaatgttgaagacgaaatgaccatcgcaaaagaagaaattttcggacccgtgctgactgcaattccgtacgaaacagtcgatgaagttattgaacgggcaaaccattcagaatatgggcttgcagccggactatggacagagaacgtcaagcaggctcactatatcgcggaccgacttcaagccggaaccgtttgggtcaactgctataatgtgtttgacgcggcgtctccatttggcggttataaacagtcaggactcggacgagaaatgggatcatatgccttggataattacacagaagtcaaaagtgtatggataaaccttgaagactaacatgtatatttaaaaaactgctgcctgccagcagtttttttctttctgtaatggcggtaaaagacgctgaatatatatgcttctgaaggagttgagcgtgatgggcacacttcaggagaaagtgaggcgttttcaaaagaaaaccattacggagttaagagacaggcaaaatgctgatggttcatggacattttgctttgaaggaccaatcatgacaaattccttttttattttgctccttacctcactagatgaaggcgaaaacgaaaaagaactgatatcagcccttgcagccggcattcatgcaaaacagcagcccgacggcacatttatcaactatcccgatgaaacgcgcggaaatctaacggctaccgtccaaggatatgtcgggatgctggcttcaggatgttttcacagatctgagccgcacatgaagaaagctgaacaatttatcatctcacatggcggtttgagacatgttcattttatgacaaaatggatgcttgccgcgaacgggctttatccttggcctgctttgtatttaccattatcactcatggcgctccccccaacattgccgattcatttctatcagttcagctcatatgcccgtattcattttgctcctatggctgtaacactcaatcagcgatttgtccttattaaccgcaatatttcatctcttcaccatctcgatccgcacatgacaaaaaatcctttcacttggcttcggtctgatgctttcgaagaaagagatctcacgtctattttgtcacattggaaacgcgtttttcatgcaccatttgcttttcagcagctgggcctacagacagctaaaacgtatatgctggaccggattgaaaaagacggaacattatacagctatgcgagcgcaaccatatatatggtttacagccttctgtcacttggtgtgtcacgctattctcctgttatcaggagggcgattaccggcattaaatcactggtgactaaatgcaacgggattccttatctggaaaactctacttcaactgtttgggatacagctctaatcagctatgcccttcaaaaaaatggtgtgaccgaaatggatggctctgttacaaaagcagccgactttttgctagaacgccagcataccaaaatagcagattggtctgtcaaaaatccaaattcagttcctggcggctgggggttttcaaacattaatacaaataaccctgactgtgacgacactgcagccgttttaaaggcgattccccgcaatcattctcctgcagcatgggagcgaggggtatcttggcttttatcgatgcaaaacaatgacggcggattttctgctttcgaaaaaaatgtgaaccatccactgatccgccttctgccgcttgaatccgccgaggacgctgcagttgacccttcaaccgccgacctcaccggacgtgtactgcactttttaggcgagaaagttggcttcacagaaaaacatcaacatattcgacgcgcagtgaagtggcttttcgaacatcaggaacaaaatgggtcttggtacggcagatggggtgtttgctacatttacggcacttgggctgctcttactggtatgcatgcatgcggggttgaccgaaagcatcccggtatacaaaaggctctgcgttggctcaaatccatacaaaatgatgacggaagctggggagaatcctgcaaaagcgccgaaatcaaaacatatgtaccgcttcatagaggaaccattgtacaaacggcctgggctttagacgctttgctcacatatgaaaattccgaacacccgtcagttgtgaaaggcttgcaataccttaccgacagcagttcgcatagcgccgatagcctcgcgtatccagcagggatcggattgccgaagcaattttatattcgctatcacagttatccatatgtattctctttgctggctgtcggaaagtatttagattctattgaaaaggagacagcaaatgaaacgtgaatcttatcaaacggaaatgttcaattggtgtgaagccctaaaagatcagattcaaaagcgaggtcagcttgaccagtttgaagatcaaatcgacaagatgattgaggctctggaagatgaccaaacaacagaagaagattggtataaacaggccgctgccctttatcgggatattacagaatcagatgatacaagtgaaagacgcgcttatgtccctatagggaaacacgtgctgccaaagcttccttacaaatactccgccttagaaccttatatttcacgcgatattatggtccttcatcatacaaaacatcatcaaagctatgtcgatggcctgaacaaagcagaatcagagcttaaaaaagcgagagcaacaaagaattatgacttaatcactcattgggaaagagagcttgcgttccatggagcaggccattatttgcacagtattttttggttttctatgcatccaaacggaaagcggcgtcctacaggagcattgttccaaatgatagacctttcatttggaagctattccgcttttaaagaacattttacccaagccgctaaaaaagtggaaggcgtcggctgggccattctggtctgggcacctcgatcaggacggctggagattttaacggcagaaaaacaccagctcttcagccaatgggatgtaattccccttttaccgcttgacgtatgggagcatgcctactatttgcaatataaaaatgaccgggccagctatgtagaccactggtggaatgtcgtggattggcgcgaggcagaaaaacgttttgagcaggcaaaagaagtcgtttggaagctctattaaaaaaagccccctttccccgggggcttcgtgttttaaaaaatccctaccacatgcaaaaacacgatgatgatggcaacaggagatagatatcgaatgagcagcagccaaaccgcaaaccactttcgtttgagattggaaccgcttttcagctcgtcaaacaaatcctgtttcggtatttttagcggtacaaaaatcgaaatcagtaacgcacctaacggcattaaaatattgctcacaagatagtcggccgcatcaaaaatagacagatgaaatatagagacgtcacttaagacaccgtatgacaatgcagacggcacaccgacaataaaaatagcaattccgcctaaccaagcgaatcgttttctcttattgacatcgcctttcgaaagtactgcgaccaaaatttccagcattgaaaaagcagatgtcaatgcagcaaataaaaatagaagtaaaaatgctaataaaaagataattccgaacggcatttgattaaacacagtcggcagcacgttaaataacagaaccgggccttggtctggtttgaggccgaatgaaaagacagctggaaaaatcgcaattccggccattacagcaacaagcatgttcataacagttacagatacagcggactgtaccagattttcctgtttctctaaataagcgctatacgttaccatgacagatacaccgacacttaataagaaaaaggattgtcccattgcatataaaatggtattggcatcaattgcagttaaatcaggcatcaggaaaaatttgattccttccatcgcgccatcaagtgtaaccgagcgcaccattaaaatgatgaataatagaaaaagcgccggcattaatacttggcttgctttttcaattccgctgcttaccccttttgcaacaactaaaattgttaccaccataaagagcagctggcctcctacagccaaataaggatttgaaatggtacttgcaaatatcgtatcaaaaccagatgtctgcgataaaccgccagtgaagccttttataatataaattaaaatccatccgccgacgacactgtagaaagatagaagaataaagcatgtcaccatgcctaaataaccgatccaatgccacttcgttcctggagcaagtgttttataggactgaacggcatctttctgtgttcttctgcctatgatgaattcacctaacaataaaggcagtccgattaaaaccgtaaataaaataaaaataagtaaaaatgcgcctcctccgctggttccggcgacatatgggaatttccatatcgcaccaagcccgatagctgatcctgccgcggctaaaataaagccgagcttcgaagaccattgatttgcttccttcaccgtatcactcctatttgatctaaccattataaaagttcattgtaagaatatcttcctatatagtcaagaacattttgattagtttacatcttatatctatatacatctgccaaaaactaatattgaattattcagaaaattatttataataagagaatgttatgaaatttgtaagaatttctgctgaagttcttgataagtgtgttaggagtgtttttatggacatcattagaaaaataagtcatttcgcaggacaaacctttggcatatgggtcattgtttttgcagtgctgggattttctttcccatctttatttacgtggatcagttcttatattacgatttttcttggcattatcatgtttgggatgggccttacactgcaagccgatgatttcaaagagctggtcagaaagccttggcaagttattattggagtaatagctcagtatacgatcatgccgctcgttgctttcggcctcgcatttgggcttcatcttccagctgaaatcgcagttggtgttattcttgtcggctgctgtcccgggggaactgcatctaatgttatgacattcttagcaaaaggaaatactgccctttctgttgcggttacgacaatttctaccttattggcacctgttgtaacaccgttgttgattatgctgtttgccaaagaatggcttcctgtctcgccggggtctttgtttatctcaattttacaggcggttttatttccgatcattgcaggtctgattgtcaaaatgtttttcagaaaacaagtggcaaaagccgtacatgcccttccgcttgtttctgtcattggcatcgttgcgattgtctcagctgtcgtcagcggcaatcgggaaaatctgcttcaatcggggttgctcattttttcagttgttatcctgcataacggtatcggttatttacttgggtttttttgtgcaaagcttttaaaaatggattacccgtctcaaaaagcgattgcaatcgaagtcggcatgcaaaactccgggcttggggctgcacttgccacggctcatttctcaccgctatcggccgtaccaagcgcaatattcagtgtgtggcataacctttcaggttctatgcttgcaacatattggtcaaaaaaagtgaaaaagaaacaagctggatccaaaagcagcaatctatcactttaaatatgcatcaaaaaaggtacatcactttatcgtgatgtacccttttttattatccttctaataaaagctgttcaggatcttccagtaaatttttgattgtcacgaggaagccaaccgcttctttaccgtctacaatccggtgatcataagataaagcgagatacatcatcggacggttttcgaaacgctcttcatcaattgctactgggcgcagctgaatcttatgcatgcccagtataccgacttgagggctgtttaagatcggagttgacatcagtgaaccgaaagtccctccattggtaatcgtgaaggaacctccctgaagctcgctaagggttaatttattgtttcttgcttttttcgcaagctcgccgatctctttttcgattcctgcaaatgtcaggcggtccgcatctcgtactaccggtacgacaaggccttcatcagcagcaacagcgataccgatatcatagaatttcttaacgatcaactcatcgccctgaatttccgcattcaacagcggatattttttcaatgcagccacgaccgctttcgtgaagaaagacataaagccgagcttcacttcgttttgctcaaagaattgatctttgcggcgttttctgagattcataacagccgtcatgtccacttcattaaatgtagtcagcatcgccgatgtttgctgcacctctacaaggcgttttgcaatcgtttgtctgcggcgtgacattttttgcacttcgacaggtttatcaaagctttgctgtgcttttggagcctgaggctgctgcttttgctgaggagccggttttgatgccggtttttcgtacgcttcgacatcctgcttgcgcactcttccaagcggatctccagttggaacttgagacaggtcaattcctttttctctcgccagcttacgggccgacggagaagcgatcgttcttgattttgcttcagattgtgcttcctcgctcacctcttgtgcagctggttcagcctgtttctcttctttcacgctttccttgctttctgctttctctgtaggagcaggggcagaactttcacccgcgccttctgaaatcgtaccgataatttctccgacctggacggtatcacccgaatctttcaatacctcttgaagtacacccgattcttctgctgtcaattcaacattcactttatccgtttctagttcaagcagatattcaccctgttctacatagtcaccaggctgctttaaccattgggctattgttccttctgagattgattctgctaattcaggtaccttaatttccgccattttttcatttcccccttagtttttgcgagtcaagctatcagatacaatacgttcctgttcttttttatgaactgtcggatctccctctgcagggctggatcgtcttcttcgtccaatatattgaacgcttactccctctggtgcaatctctgtcaaatacgggctgatataaccccaagcccccatgttctgcggctcttcctgcacccaaacgatttctttcaggttcggaagttttgcaaataactctttgactccttttgccgggaatggatacaactgttcaattctcgcaatgtgaagccactctttaccgtcttctaacttattaaaatgatcactgatgtctatagacactttaccgctggataatacaagtctggttactttttcatagtcatgagaaagtcccgactgttcataaacaggctggaagcggctttcgctgagctcctgcacttccgacaccgtatttgggttgcgaagaaggctcttcggcgtcataatgacgagcggtctgatttcttcacgaagcagcattttagcctgtcttcttaaaatatggaaatactgtgccgcgcttgtcaggttggcaaccgtccagttgttttctgctgcaagctgcaggaatcgctcgattcttccgcttgagtgctcaggcccctgtccctcgtagccgtgcggaagcagcatgactaatccggatttttggccccatttcgcgcgtccggcagaaataaattggtcaaaatacacttgagcagcgttggcaaaatctccgtactgcgcttcccacaaaacaagcgtttccggtgaatgcacgttatagccgtattcaaaaccgagaaccgatccttcagacagagggctgttatgaacagcaaatgatgtgctgcagtcagataagtgatgaagcggcacaaattcttcgcccgtctcactgtcatgaagcacaaggtttctttgggcgaacgttccgcgctcggaatcctgtcctgttaaacgaatcggtgttccgtctttcaaaattgaagcaaacgcgagtgattctgccaaagaccattccacttttctgtcatcatcgaacgccttggcgcgtctttctaaaatgcgctttagcttgccgaaaacattaaatgactccggccagttgatcaattcgccattcagcttgcggagcacatcaaaatcaatcgaagtgtccacatctgggaaaccgtttgatacaggctctggaagttcaatttcacaggcagtgtgttcctttttagacggaactttctgatatgcatcttcaatgcgcttcgttaccgatttttcgatgttttgaacgacttcctcggtaagtacgccttcttttaccagcttttcagcgaaaatttgtttgacggtcggatgctttctgacagcatcatacaacattggctgagtggttgacggttcatccatttcgttgtgtccatagcgtctgtacccgatcaaatcaatcagaaaatccttgttgaatgtttttcggtattcgaccgcaaacttaacagctgaaagacaagcttcaggatcgtccgcattcacgtgaacaatcggaatttcataacccttggccaggtcgctggcatattttgtcgatctggattcagcgctttctgttgtaaatccgatcatgttattggcgataatatgaatcgcaccgcctacttgatacccttttaaagaacttaaattcaatgtttcagctacaattccttccccagggaatgcagcgtctccatggattaaaatggccagcgattttgtttcatcttgtaccgggtatccgctttgtgttcgcgtttcctgtgccgctcttgtgctgccttcaacaatcggattgataaattccaagtggctcgggttgttcgctaacgtaatgcgcgctgattttgtttcagcgtcttgaagctcccgattcgcccccaaatggtatttgacatcccctgtccatccgtagctgattccaattgatccctcagacgggacaagatctttattcggcgcatgctggaattcagagaagatgatttcatacggtttgccgagcacatgtgccaagacattcaggcgtcccctgtgcgccatcccgatgttgacacttgtcgtgcctgatttgacagattgtgcaataatgtcatcaagcactggaacaagagcgtccagaccctcaatggaaaagcgcttctgcccgacgaatgtgcggtgcaaaaactgctcgaagccctctacttcagtcagtctttccagcacagccgacagcttttcagctgagttcttctggaacagctcgccagattcaatctttcttgtcagccactcgcgctctttgaagtcatgcacatggtcaaattcaaaagagatggttcttttatacgtatttcgtaaatactgaatggcttctaaaccgttcgtaatgtttttaggagcgtctttgcagatgacagacgcaggtattgcttttatttcctcttctgttagcccgtaatcggataatggaaaaagttcgctctttttctcatcctttctgagcggattgacggaagcgttcaaatggccataggttcgaatatcttctgcaagtctgactgcggatgcgatcttttgaatcagatcggctgtaacacgtcccttttcttttgttcccgaggcctcttttatatcgcttggcggagcaccgagctcgtcgaacatttccttcaaatccgggtcaatgctgttcggatcctgggtatactgatcgtaaagctccagcgcatagccgaggttcggaccgtaaaaatcttcccaattcattcgttgtttcatactattttgaaacatttgaatattacccccaacttaaataatcaagtgatcgattcactatcttgaaataactttcgaacgctgtgtccaaaattatgtaataaaaacgcttccaacgatattttaccactgtttgcaatttgattctaccttgattgttcacaaaatagtaaaaaacctttataaaaaacaaaaaatttaatcattcgaaaaaacaaacgccaaaaagcataggattaagggctatcctatgcttttatgaagcagttttttcagcagcggatacaaaacatccggtagctgatcaacatccgggacaaatatactgaattttccgtacatatcctgaatcgtcttcatttgcgattcttctatttctgagttggagagaaaaacatttatcacttctattcctctttttcgggcttcgataaccgcctcacttgtatcgacgatcccattttgttcgtagccaaatgcggccggctctccatctgagaaaacaattaagaacttttgcgcctcgctgcgatgcagcatttttttcgtcatctgcctaattgcgtacccgtcacggttatcttcttctggctcaagctgcataatggccggtccagaatcttgtcttaatgatgattggaagggaataaccgtattgaaatagtttggttggcttgtttcggttgcatcatttgtgtcctcccagaaaccgacaatctgatgcggaaccgctaccgatttcaacgcttcgtgaaacagcacgattcctcgttttgtttcgtccattttgtcgaacatgctggcggaacaatcgaccagcaatgtaaaaactgcgtcgatttctgtagacggttcttgctttttgtagaacaggcgcggatttcgctcagtgaagtaacgaagaagcttattattcagtctcccggcatgaagatctgttctcggcaatgtttttttatgctccagcgttttttgaatcatttgtttcaaacgcttttgatacgattcaatcgtttttgcctgctgtttataagaaagctcctcttcactagttgccggctgcggttctttataaattggaaatgcatatttattttctttgccgtcagccatacccgctccgttcggctggtctttttgagactccagcgcttccagcttggaatagtctttccgtttcgtatgtctggctgatccttgaacagagccaagggcctgatctccatcgtcgccttcccttgaagcatcttttcctaaatctgattttgcgccgtgttcaatatcaaattgaaggaagcttttagacggtgcttctgtttcccggtgccatgtcggcatttcttcttcatggatatcctcatcaccgtctgatttttttggaagcgtgatgtcatcactcagcttcggcgcttttttctcttcttcaaataacggctgttctgcagcttttgcgtagtcaagctcaggcaaaaagaagtaggtgttcaacatgtctttatcgagcacctcttcaagtccgtccatgaggtcctcaacaattttcagaacctgccgtgtcgaatctacttcatacacacgcaagagctgctgctcaataaacgggcgcatcagatcgatatcttcacgcatggatggaagggtctcgagcggcgattccgctgtgagcttgacatagatcgcgcaaaagagcgcatcggtaaaaatgcttcgttccaaatttaaggtcagctgggttgagaaatgttttctgtacatgtcttttcgcttcgcaaatacatgtttcgtacccggacgctcacgtttgatgcattcttcgatcctaatgtcttcaagcagcataaagagctgcttggcaaaacttttaaaggtgagatgacgatggatatcattcaaaaagttcgcaaactcatgcagcgagctatatcttgttccgactgaacgcaggtagacgtcgcttttcagacccgcttccatgtcctcagctgccctgtctttccaaaagtggctcatatagattttcttttcaaatggattgtaataggactgaacgccatactccacttctaccgcttcactcttggtgagtgttttggccaaatcagtcagcatcataaataaaaatgaatcaatcgtgctgtcgttaaatttgataaatttcatcgcagccccctcattcaaacagagtttctgcaatatttcggacggccgctttttcccgatcatcatcaagcttttctacaattccccgctcaatggcacgacgcggcggaatataagcagctaaatcacatgtatcgattaaagctctgatggatgccgcttcttcagacacctgtccgttattggcctgaacgatcaagtcagaggaaagcgtgataaatctgtcaatcaatttctcgtctttcaaggctgactgagacatgagcacttgtttcagcagctcgcctttaatataaggcacatcaatgatgacaaaacggtttttcaacgcttcattcagaggaacagttccgacatagccttcattgatggctgcaatgactccgaaaccgcttttagcccgtatgacctcgcctgtaaacggatttgtcatcatttttctgtaatctaatacaccgtttaaaataggcagtgtttccggcttcgccatattgatttcatctatataaagaaaatggccttccttcattgcctttgtaacaggtcctgaaacaaactcgattgtcgcctggccagattgattttcaatcgttttataaccgaccaatgcctcagcatccaagtcgactgaacagttgacgctgtgcatcggtttatgaaaatagctggacaatgtttctgccaactttgtttttcctgaacctgtaggccctttcagcaggacattttttcccatggctaatgcaataatggcgtcaaatagaatggcttcatcctccgcctcatagcctgatgttcctataagcgattgaaactccggggaaataggctgctctttatatgataaaagcttttgttgtatatcttccggcaatgttaagtgctgtagttgtgttgtcatagacagattccctttcctattcatattccttaacgagtatactaaaaaagcccctgtatgctcaatacaaaagggcttggatgatattactgcttctcgttatttcccaaaagggctccgcagacaatacgcgcaccggaattgccgcttgggtttgtcagataatcgtccgcttgttcatgaataataaatgcacttccgtcctcgtcgagaatatttagtttacttccttttttcagtgaagtgtcaggcgcattcattatgacatctacctttccatcagcaccgacttcaaggttcggcagatctccggcatgatgccccatcggattattgaagccgtgttctttgttcagtggattaaagggaccgcccgctgattcaaaatccggcctgacacaagaacctttctcataaatatgaaaaccgagagaagcacctggacgcaggctgtttgcggaaatatgaatatcgaggccttcatcatctgattctttgatctctataaagccgactgctttcccttcacgattgaccaactggacatgatgaccaaacgctgacgtttcaaccacttttttttccggcacccggttaggagggtctggaggttttttttgtccgcatccggcaactcccagtgccgtcagcatcatcaacagcaagagacggtacatactgtctcccccttgttttttctaacagtgtggtcaatcattgtctggtataaacaaaaaagcctataaaaggctttttgtcatactcatttttaaaaataacttcttgcgcccaagtaccgctgtttccaatacgaattgctgagattggaaatgtcgacgcccgatgagcttgcatgaataaaatcaccgccgcctagataaatccccatgtgagacgggccggatttatatgtggtaaagaagacaaagtctcctactgacggctggctgactttctgcatgacattccaataccctgccgtactcaatcttgatatagatgatacattattaatgaggtaataaatgaagccgctgcaatcaaaaccggcaggcgtgtttccgccccatcggtaaggcactccgacatattttttcgcttccgttatcattctgtcaatcttcgagcctatttgaatgtttgaccctgagttatcttttggctttgttggctttgtcggatttgaaggattagattttgatgctcccgaaatagtcagaacctgcccgatttgcaacacatccgatgataaattgtttttatcacggatgctttggacagtgactccgagccgatttgcaattttccacagcgaatcgcctgcttttaccttgtacgtcgttgtttttgagggattggagtttgacggcttttttgaaccgctgtttccgctcttcggtgagctgcttccttttattttgagcacctgtttagggtaaagtgtatctgatgttaagccatttaaggtttttaattcagctacagtcatatttaagctgtttgcgattttccacagtgagtcaccaagcttgaccgtatatgtactttttgaagaacctgaagaattggaaccgctgtttttctttgatccatttgatccgcttgaactgcttgtccctttgatcttaagcttttgccccggacgaatcaggtcactgctcaggctgtttaagcttttaagctcagaaacactcattttatgatttttagcaatcatccatagggaatcaccatatgcaactgtgtatgttgatgttttgcttgaattagatggggatgtcgtgctttttttgctgctttcaggaaccttaagactttgtccgacataaagcaccgttgatttcaatttgttttcggatttcagagctgatattgtcgtatcatactggcgggaaagtttccaaagagagtcaccgctttttacttttatcgtttttgcttccgcgggtgctgcggccatcgacgacccaacaactgcagaaacagccaagccggctacaatcttctttttcattcattcaacctcctaaactgttttttgcaaaaacagctagtattttgtttccaaaaatggcacgcaactgttttatcgtcaatttttcagcaagttaaacccttttcaaacatttggcagcattttcagcatcgttcgacctttaaaccttcaaataaacatctaacattttacataagcacgatatgtttttcgaaagtctaaggaactatttaagcgagggtaaaaatgatggttttctattgatgaacgaagcagtttctcctcctttcttgtctatttttctaatcaattctctatcggcgtgtcaaatccctcttatgaaatggcaaaaagcctgttctttcgataagaacaggcttttacactatgcatttgctgattgagttttttgttttacagcttcaagaatgctatcggccgcttttttagagccgcctgccgctttcagtgattgtccaatttcttttgccttttcagcatacgaaccattattcattacatcttgtatcgtctctttcagaaggctttcagataattcttctttttttaacacttttcctgcgccgactttttccacctgatctgcgacaacaaattggtcgcctcccatcggaatgacaacgagcggggtttcaaaatacaaaccttcacttgtgctgttcattccgccgtgtgtcacaaataagctggctcttttcaagatctcaagctgagggacatacgggcgtacaatgaaattctccggaatgtcgtttaactcacttgttttaatatgcttgccgatggaaagcacaactttaccgtcaaagtccttacacacttcaaggcattgattaaaaaactgcttttgattattaaaaatggttcccattgaaataaacagcacgttttcattgtcaatctgatcaaatgggaaatcattgtttccggctctttctgtaatggaaggaccgacaaatacatatcgctcgccaaattgctcagccagtggctgaaatccccttgatgtaaagacgattgtcaagtcaccatcagctaaaaaaacatcaaatggcttcttgatctctgcttgaaaatcagcatttaacgtttctgcaagctgctggtatgattcataatgaggcgaatcttcaagtgatcctttcatgtacgctcccatcatttccttcgcaaattcctcattcatcgcaaaggttgtacacaatgaaaatcttggcagcttcagcatgttggcaatgactttacccgcgagaagatggtgatcatatatgacataatcatacgattcatgtttgacttcctcataaatatgagtcgcgatatccttacaggctttcaaaaaagcgcagagcatttctgtgaaatctctttcttcatcgccggttgcgtttttcccgaagtaatctcctctgaaatcatgatactcacgaaactctatatcaagagctgtgattttttctttatattccttcactgcgtagtacgtaatgttttctccccgggatttcagctccttcatcacaccgatagagggattaatatgcccttcaccgggaaaaccgatcattaatacattagccatgcgacagcacccttcctttgaaaatttatgtaatattttatacggtactataaatacataaacaggtaaagtatttcacttaattaatattcattacatataacttttctaccagtttatatttcctgtcttcaagacaaaaagcattcagcttgaagcgaatgctttaataaagatacgaattcagtcattttgtctcatgataggattcttaatcaggccctttttattatttttacgttcttggtgaaattaacggatataatacaccgtctttggcaaacgacatcttccctgtttcctctgaaaccacgagcaccagtgcatccgtatagcccgacataccgagagccgcccggtgccgggttcccaaatggatatccacttccttcgtcgtcagcgggagcacattggctgctgacacgagtttgttttccctcactaacaaagcgccgtcatgaagagggtttccggggaaaaagatgctttcaattaatgaagagctgatctcggcgtgtagggaggtgcctttttgaataaaatgttcaaccgggtccgctctttcaatcacaattaaagctccatgcttatgttccgataaggctttaatcgccttggccagctcaataaatgccggcgtaaattcctcaatgtatgattgcaaataaaaggaggatgcaatcccctgcatgtcctgaaatatgtgccccaaatcatctaattcacaaaggagacactggtctttttcgtgaagcgttttcaagattagagatgcatcacctaatatttgctctaggtacacctgtattttccccttgaacgcattttctgatatctgctcatagcgcataatcttcatctcctgttcaaatttccaacttttcacgaatgcttatcttattgatgcacattctattggtaaaggagggatgtaaagaatggaaatcgaaagaatcattcagtatatttgcacctttttaggcgtgatttcgctttcttttatttatgcccaaatgtttagaaaaacgaaaccgacaaaaaaagaataggcccggcgttcattgctttttatacataaaatgttataatttctctcgttatgaaaaagaaacggagatcaatgtatgaaagaaactcaaaacgcccgggaaaaaatcaaacagctcttgcacattttaataccgatattcattacccaggcggggctttctcttatgacttttctagatacggtgatgtcagggaaagtcagccccgctgatttagcgggtgtcgcaattggctcaagcctttggacccctgtttacacaggacttgcaggtatattaatggcggtcaccccgattgtcgctcagttattaggcgcagagaaaaaacagaagattccctttactgttttacaggctgtatacgtggccgcgctacttagcatcgccgttttattgattggatatgctgcagttgaccttattcttggccgattgaaccttgatattcacgtgcatcagattgctaaacactttttaggctttttatcactgggaattttccctttatttgtttacaccgtgttgagatcattcatcgactcattaggaaaaacgagagtcaccatgatgattacactcagttctcttccgatcaattttgtattgaattatgtatttatcttcgggaagttcggaatgccggcacttgggggtgtcggcgcggggctggcatccgctttaacttattggtgtatctgcatcatcagttttttcattattcataaaaacgcaccgttttctgaatacgggattttccttaccttgtataagttctcttggaaagcatgcaaaaatttgctcaaaatcgggctgcctattgggttcgccgtgttttttgaaacgagcattttcgcagctgtcacgcttctcatgagccattttcatacagtgaccatcgcgtcccaccaggcagccatgaattttgcgtctcttttatatatgctgccgcttagcgtgtccatggctctaacaattgttgtcggatttgaagcgggtgcagcccgttttaaggatgcacgctcatatagcttaattggcatcatgatggcgatcggcttttctttgttcactgccgcctgtatccttttattcagagagcaaattgcgggcatgtacacttctgaccccgatgtgctccggctgacacagcactttttaatttatgcgctattttttcagctttccgatgctgttgccgcaccgatccagggagcactcagagggtacaaagatgtgaactatacgcttgcggccgcttttgtctcttactgggtcattggccttccggtcggttttatggtcggtacgtttacaagcctcggtgcattcggctattggattggattaatagcgggactcgccgccggagcagttgggctgtttttcaggctggcaaaactgcaaaaacgttattcgcaaaaacaacacatttaaaagaggtgatcaatcatggcaaaaaacaaaaaattattcgagtatctttcccagcatgcggaaaccatcagttcaacatggtatgaaacaatcgaggagactgatcccaattccatttatgcctcaacagatcctgttgtcattcacaatttaaagagccagaatcttgcctttaactataaaataaaccgtatttttatagatgatgaggacgtatacttgcctatactgaaagaatgggcctttgaagtcacacaggatcaagagcatttaaaaactcctatccactatattattcgggagtttgtcagagtgagagatttatatgtttcctatgtgaaagaatttgtccatctcaatcaggatactgtgaaaagcgaagaagccgaagacctgtatcacgcccttataaaagcgtttgatcttgtgattcatatttttatagaagaaatgtacaaaaacacaagccttcagcttcaggcccaaaaagatatgattactgaattgagcgctccggtcattgtgctgtttcacagcgtcggactgctgcctttaatcggagatattgatacagtccgcgccaagctgattatggaaaacacactgcatcaatgtgcgaaaaaaaaggtgacacaactgtatattgatttgtcaggagtagctgtgattgatacgatggttgcccatcagctgttcagtctgattgaggcgcttcgtttaatcggtgtttcttcaactttgtctggaatccgtccggaaatcgcgcaaacagcggttcagctaggtttgtctttcgaaggtatttccttgagatccactctcgcttcagcaattgcatcggacttaaaattaaaaaaggtataaggcttaaggccttatacctttttgattaatcattccattgatacgtccaatatatttcttcttcaaaccatgttgccataacaggttcattatttttcaatttctcttcaagctctctgagcatgccttctgtttgtgtgcggtgagctcttaacgcattcattttaatatcagctacttctttgatatcaagtacgacatcagcttcgccgagaacctcttctctgttgcgggtaatggccatgcagattgtacgcggacggtcttctttctttttgcggtacaatgcacggataaccgcttccccgcatgcatcatggtcagggtgcacaccgtgtccgggataaaatgtgacaattaaacttggttttacatcatctatgatctcttccatgatatcagctaaatactcatcatcttcaaattcgagcgttttgtcacggagtccaagcatacgaaggtcattgatatccatttctttgcaagcgttgatgagctcttgttttcttagcagcggcaacgtttcacgattcgcgaaaaatggatcgcccatatttctgcccatttcacctaaagtggcgcaggcatacgtaacgggaatgtctttttttctgtttaaggcaatgaggcctgccactccatatgattcgtcatcagggtgaggcaggattactaatacgtgttctttcattatttttcacccttttctttaaactgtgaacggtttttcactgatttgcagagaaatagccagtttaccgcccggcagatgtcccgccattaataaacggttttcttcatctaccgtgtattcagtcaagccttcagcataaatccagccttcttctgttttcaagccaacgcggtaaggcccgttgcctttgatttttgcctgatgataagtgacttttgcattgcggatatacgcaacaaccgtcatgttcttttcatttaagtgcgctgaataagaacctgtggtggtttctaaatggatatatacagggcggtccgcatatcgttctaaagatgcttgcacatcttcttttatgatcgctttcatgattgctcccctctttcttcttttaaatactctgcacgttctgtatgtaatttgaccagctgatatttcacagccggttcgagctgtgaattcacaatgcgctgaatcgcggcaaaatatttttccagcatcggttttcggagtcttggatgtgttcgtttatccaagagctcaagatcaatcgcctctgctaccgcttctgcgtcatcatgtgcgagagatcggttattccaaagtgaagcatatgctttcactatctctttatcattgtccatcgtcttgctcctttatgtcttacatacatgaaatgattatacataatatatgcatcagctgaaaagccaaaggcctcaatggctttttgacgcccgtttccacttcacttgtgaaaacgtaaacaagatcagcgcagcccatatacagctgaatgtaaaagccttcgagctggaaaatggctcattgtaaacaaacagcccgatcagaagggtaatggtcggcgcaatatattgtaagataccgacttgatacagtggcagccgtttcgctccttccgcaaacaataagagcggcaaagccgtaaacacaccggccaaaaagagaagcagccacgtccctccgctttctgcacccgctggctgaacatgtccgctgaacagcaaataccccaatgcaatgggcataatcatgaatgtttccagcgttaaaccgatggcgctcggcaggcttgttctttttttgcttaacccgtacagcccaaagctgaatgcgagcagaagcgcaacataaggaatggagccgtattggaacgccgagatgatgacaccggctgccgcaatcgaaacggccactaattgcaggcgattcagtttttcctttaaaaataaaatcccaaggagcactgatacaagcggattaatgtaatagccaagactagcctcaagcaaaaagccatggttgacagcccatatgtatacaaaccagttgatcgaaatcaggatagaagcaagaaataaagagaggatccctccgttctttttcagagagcgcagctcctgccatcctattttccattgccgcaagaaaaaaagtacgatacacataaaaacaaaagaccatataatacgatgagacaaaatatcaagagccggcagctgttcgagaagcttccaatagagcggaaacaggccccacatgataaaggaaacggctgtgtaaataacgcctttttttgtttctgaatattgcatttatatccctgcctttctttagagcatcttatattatatcacgtgaaagatctggcgggcatatactattttgtccgtgaagaaaggatgtgaagacaatgtttgagtggaacaagtactttcctttccacaatcaattttctaaagaagcattaaaaaaagctgatccgaaagaagttgaaacgtatgtcaatcgtgtgatggaaagtgtgttcggcagtgattatgcggctcaatttcctttccgcgatcctcttccccaaaaagaacagcccgccaaacctgatgcaaaacctgatattgatatattcgaaacagcagaccatgtgtttgtaaaggtgccaatcagcgaagaatggctggaacaagtgagaatcaaacacacatctcacgaattatggttggaaaacttcccaagagcagatcatccgaaaaaagtaaaccttccttgtttagtcaaacgcaaaggaacaaaagccgtctataaggatggccttctggaagtcatgtttcaaaagcagcaagactacaatatgtccgaggtagaaatcatccgataaaaaacggcctgcaatcgatgcaggccgttttttattaatagaaaccgggatatcccccgtatggcacgccggcaccaaaaccgtacggtccgcctccatatccataagggccaggaggataggcatagggacgagaatagttaaacagcgcactcccgagaaaaccgcctaataaaccgccgactagaggagcgccaaacaaaaaaggactacgcgccggatatccggctggacctgggattccgcgtaaatacgaatgatgagggtacatgaatttttcctcctttatgtctgcctatacgtaaagtattcagcaaggaagaaaaacgattgggctacggactgtctatgattgttacatcacaagccctgccaataacacacagccgagccctgtaaccgaaagaactgttgtaagcagcgtccaggtttgaaatgtttctttcatactcaagccgaaaaattcctttaccatccaaaatcctgcatcatttacatgacacgcaatgacactgccggctcctgttgcaagcaccattaacgcggggtttacactgccagcctctataagcggagctgccattcccgctgtggtaagcgcagccacggtagcagagcctagacacagacgcaaaaccgcggcgatggtccatgcaacgaatagcggcgacatgtttgtttgacggaaaaaatcagcgacataatcgccgaccccgccgtcaatcagcacctgtttaaacgctcctccccctcctatgatgagcagcatcatcgcaatttgcgaaattgattctgaaatagatctgctgatttcctgcatagatattttacgggcatatcccatcgtatagagtgcaagcaacagcgaaatgagcattgccgttcccggagtgccgataaattctataatgtcttttccttttgaatgttcactcaataataaagaaaaaactgttgccattgccataaagataaccgggaataaagacgtgacagcactgatcgcaaagcccggtgtttcattcagctgaaattctttccttggtcctaaccccgataggtttccatgcttttgatacgcaccaggaaaccgtttcatcgcaaatttattaaataaaggcccggcaatcacagttgtcggaacagcgatgatgattccaaaaagcagcacctagccaatatgggcaccatatgcaactgagatagcagttggagcaggatgtgggggcaaaaatccgtgagtaacatttaaggcggcggccatcgggattcccagatacagaaaagacatttttaattctttagcaatcgcgtaaacaatcggtatcaacagaacaagacccacttcaaaaaacagcgcaataccgatgataaaagaggcaaccacaaccgccgcctgtattcgtttcctcccgaatttgccaatcagcgtaatggcaatccgatagccgcccccagcatctgagacaagcctcccaagcatcgcgccaagtccaaacactaaagctaaatgccccagctgcccgccaattccagcctcaattgaaagaacaattttattgatatccattccaagtccgatctctactaaaaatgaaacgacaatcagtgagacaaaggtatttaattttactttaataatgagaaataacagaatcagcactccgacagctacaattaaaatcggcatggtacccctccaaaagtgttttatatgattctcgcgacaatgttttggcgtttttcatgcctagacgaacagaaaacgctttcattaataactaaaaacgtcttggttatatgattgttatcttttgatcaactaatatgttcatactaatctcctaatcaatgactgtcatcgtttttatgagcttgtctcgattacctaccgcctaacccaatgatttattagttatatgttgattaacttttggttatatgttatgttttttaaagttgactgccaatcattatatctattcattgtctggaagcaaatgagacaatatgagaacagacggataacaacttcacagaaggaggagtacacatgccattattgcgttttgatgtaattgagggccgtgatgaaaaatcgctgcaattgttattagatactgctcaccaagcgatggttgaagcatttggtgttccggaaagagaccgttatcaaattgtccatcagcatcccgcaaacgagcttataatccaagatacgggattagggtttcagagaaccaaggatctggtcatcattagtatgacaagcaaagcaagaaccgaaagccaaaaggaaaaattgtatgctctgcttgctgaaaggctagaagaaaaatgcggaatttcccctgaagacctcatggtatctattactgagaatggtgacgcagactggagtttcggtcttggtgaggcgcaatttttgaatggaaaactataaaatttcgtctccccacaaaaaaaagaagagagagctccaagaagctctctctttttttcataaatgcggaagtcatcagtatagaagcatccagcaatacgaaaaacctggatctccttattagatccggtttaaacgccaattggatgctgactgggttttggccgaaaatataaaattttgctgatttgcataataagataactcataatccccatttacaacaggttggatgctataacttattgatcatttccatgaacatgacacttttgccaatccggaaatgtcagtctgacaaatataaaaagtcatgtaaacggggtgtgaaccgtacttacatgactcaccatggaaacaaaggctctttttcagacgccgctttccttatttctcttcttcacacactgtgtcaccaggctcgcaaaattgatcggcccatgcctgcatctcttgaaatacagcttgaagcgctgttcctttttcagtcagcgtgtagatgactttgaccggcgtttcagggagaacctgccgttcgacaatctcgttttgttcaagctccttcaagcgctctgccaacattttttggctgatcatcggtattgtttccgttatctctttaaaccgtttcggcccatccattagcacatggatgatcagaccgttccatcgttttcccagcaatgagaatgcggattccattttagggcacatcgtatttcccacaagtcttcatcccttcatctattgattgacatgtattcaatgatccattacaataatctttcaagttacatttagtaagcttctaacttttctattatcataccacgtttatccgaaggaggaaacactatgacgaatactctggatgttttaaaagcacgtgcatctgtaaaggaatatgatacaaatgccccgatctctaaggaggagctgactgagctattagaccttgccactaaagcgccttccgcttggaaccttcagcattggcattttacagtattccacagcgatgaatcaaaagcggagcttcttcctgtagcgtataatcaaaaacaaatcgttgagtcttctgctgttgttgccattttaggcgatttaaaggcaaatgaaaacggtgaagaagtttatgctgaattagcaagccaaggctatattacggatgaaatcaaacaaacattgcttggccaaatcaacggtgcttaccaaagcgagcaattcgcacgtgattctgctttcttaaatgcttctttagctgctatgcagcttatgattgccgcaaaagcaaaaggttatgacacttgcgcaatcggcggatttaacaaagagcagttccaaaagcaatttgatatcagtgagcgctatgttccggttatgcttatttcaatcggcaaagcagtgaagcctgcgcatcaaagcaaccgtctgccgctttcaaaagtatcaacttggctgtaaggatatgaaaaaccttagtccgaaatccggactaaggtttttttatacaatcgcctctttgtaccattcacgagcctgttcagcttcatgctgagtcagctgatggcccccgtcctgccagtaaacggaggctgatgccccgctgtcacgcaaatagcggtaaagctcttctgattcttccttcgtgcaaagaggatcgtatttcccggcaccgataaaaacagggagccccgccatatcaggcagctcgataccccgaatcggaaccattggatgatgcagaatagccccttttaacacatctttataatgaaaaagcaggcttgccgcaatgtttgcgccgtttgaataaccgactgcaatcactcggccgcgattaaactgatgcgtttctgcagcctcgtcgataaaatctttcaattctcttgtccgcaccacaagatccttttcatcaaaaactccttcactcagacgtttgaaaaatcgcggcattccattttcaagcaccgatcctctgacaccaagcaaatgggcatcagggtctataaaccgccccaatgaaagcagatcgtgttcattaccgcccgtgccatgcaacagcaaaagtacgttgtcagatgttcctttttcataaatatgcttcattataaattcccccttttaaagttcaggtaaaatgtctgtaatttgttgtctatgtttctccagccattcaggcagttttaaggaagtccctagctcagcaaacgtttcatctgtcataaagcccggttcatctgtggcaatttcaaataagataccgcctttctccctgaaataaactgatgtaaagtattccctgtcgagaatttctgacgcaggcagatggttttcagcaataatcggcagccatttcgcctgttcctttttcttagtccgaaacgctacatggtgtaccgtaccatatcctccgactcctcttttttcaggatgtaaatggacatcaatgacaccgccgacggccgctgaggatgccagtctgacaatctggtcttcttcggccactttggtgtatccaaagctttccgttaacaattgtatggtcgcctgcgggtcgtaagaatatagcagcacacctttcattcccgtaattgcttcatttgttgtgatcccgtcaggcgtccactcgcttttgccgcttttcgcatcctccatgatcgccagcggaaggtcttctgtatcgtcaaaaataagacctttttcaccaaacaacgttttttcctctaggctcagcccgcttttctcaagacgctccttccaaaaagacagggagcctgagggaactgaaaagtacacccggcccgcttggccttttcctaccgttccctgtccgcttccttggaacggaaaaaaggtcattattgtaccgggatctccgttttgattcccaaagtaaaaatgatacgtcccgggatcatcaaagtttactgtttttttaacaagtctgagcccaagcacttctgtataaaatcgcaagttttcttgcggatctctggcgaatgctgtgacatggtgcaatccttctgttttcattttctcactcctatttatctcgatttcaagatatttattattttaaacctttattgaaaaggatgcaaaccatgtgttttgtttaaataactgaaaaaatcatttttttctaataattatcttgtgatcttttcttacaactgctattatagtgagcattatcatgtttcaggaggaaagtaaatggttaaaaaagcacttattgttattctcattcttttgccattcgttcagctcgcgcttttgccgcttgtgaatcgaatagaaccgattatgttcggcctgccgtttttccacttttggctgctgctgtggattattgttacgccgttatgctcgtttggcatttatcagatgcaaaaaaaagatggaggacttgaataatgcaagggaatctgactgcacttctcattactgctattattgttttaaccgttgtctgtatcggctttctcgccggaagagacaaatcctcacgtacttctgtggaagaatggtctgtcggcggcagacgcttcggcggtcttctcgtctggtttttagtaggcgctgacctttatacggcctatactttcttagggttgaccagtactgcttttacaggcggaagtgttgcatttttcgccattccttattctgtgttggcctactttatcgcctacttcttctcgccaaaactttggaaagttgcgaaaattcataaattaacaacactcgcggattatgcccgggaacgttttaacagtaagcttttggcaagcctcgttgccatcgttggggtactcatgcttattccgtacatatgccttcagctgagcggcattcaagacacgcttcaggttgccggcactggctatattaacgtaaaattcgttgtgatcatttcatttattcttgttgctctttacacattcttcagcgggattaaagggcccacatatacagccatcattaaggacattttagtatgggtcattatgctgtttatggtggtgtccctccctctcattcattttaacggctggacgccaatgattgacacgttagtgaaggaagcgccgcaaatgctgacgataccggcagaagggccaaaaggcatcccttggtttatcacagcatctattgtttccgctctggcactttttatgtgggcacacgccgctacaggagtttttacagcgaaaagcgctgatgcagttagaaaaaacagcatgtttttgccgctttacaatattgtgttaattttggtcatttttcttggctttatcgcctttcttgttctgccggaagatacaaatccaagactcgcgctgctgcatttgattcaaacatcttacggcggcgtggcacaaggttttgcatatgccactatcgctcttgcttcattaataccttgttccattatggcaatcggcgcatcgaatttattcgccaacaacctataccgggatttgattcatccgaatgtgtcgcaaagcaagctgactcttgtcacacgttcaatggtgtttgttgtcatcggtctcgcgctgctgtttggaatgctgtttccgactgccttagtgacacttcagctattaggtgtatccggtatggtgcaaatcttccctgcgattgctgtcagcctgttctggaagcgtcaaacaaaagaagcgacagttatcggattattagtcggccttgcggttacgtttattgtgtataccactcaatccgcacatggcatttatgaaggattctggggattggccgccaacatgatcgctgtggtgatcctgaatccgctgttcgttaaaaacgcgggatccaatcctgtcattgaaggtttatttggcaaaaaacaagacgctaatccaaatcaaaagggtgcataaaaaaaccatacgcggcagccgcgtatggtttttttacatttcttttttcagtgtttcaattgccttttccatttgcgtatcattatcagacagcttcttttgaagttctatcattaatttcgttgttgtatcgccagtcagtatgcctgtctctttcagcttctcttttttctggaactgtttgacgacagatacaaagtcctggtcatacgtactgttaacctttaccttgtaaccaagtgctttgagcattttctgagccactttgacgtttgtgcctgtatcacctgatttgtacgttttatctgcgtccaaatacggcagcttcgcgtaatcaggcagctcagctttcacttgaggcttgatgccttttttgtgaatccattcgccgtcagcagtcagccatttggcaactgtcagtttgacagtagagccatcatcatattcttttgccgtttgcactgtacctttgccgaatgtcgtctcgccgattaacggtacgtttgacgattcatgaagggcagcggccataatttcggctgcgcttgctgtaccgtcatttactaaaacgacggtcggcttggtcactttccgttctttttcggccttcatgacttcttttgaaccgtttttgtattcaacctgcatgatgtttttccctttatcaatgaacaggttgctcatcgtaatcgcctgttccattaagccgcccgggttgcctctcaagtctaaaatatagcctttggcgccttttttctctaaactgtcaatcgcatctgtcagctctttagctgttgtttcagagaaagaagtgatttgaatttctccgatgttgttgtctttcatctctgaatagacagtctctacaggaatggtatcgcgcttaatggaaagatcgatattccccactcccgctctgttcagttcaagcttcacctttgtgccctttttgcctcggattaaagcgacggcttcatttacattcatgccttttacgctttttccatttaccttaatgatttggtccctcggtttgataccggctttttcagcaggtgaacctttaattggggatacaataaggatttctccgtctttctcctctacttgggctccgattccttcaaaagatgctgaaatcgtctcgtcgaatgatttcgcttgctcttgatccatatatgtagaatacggatcatccagtgattgaatcattcctttaattgctccgtctactaatttgtcatcatctgttttttggtaataatcacttttgatttgctcatacgctttatttaatttgtcgaacttgctgtctcctgtgcttgctgatttttggcccaggatactggaattgcccgtaataaataaagtaagcgccgaagcgacaactgcagtgatcagcacaataaaaaacagttttaattgccgtttcaattaaacaccacctttttcttcttacattattatcatggacgaattcttattcgtcaactcggagcagaaatgaaagagaaacgcccttcttttgcttttcataaacctatgtctttatacgacatatgataaggaaaaaggaggattcgatattgagccgatatttagaaatgctgtccttattcggtgtcgcaggggcgcacccaggcgggctggctttttcaaaagcggtcttgcaaaaggctgcaccctctccgaatcagccgattcttgatgccggatgcggaacagggcaaacggcggcttatttaggacatttgctgtatcctgtaacagtcgttgataaagatcctattatgcttgagaaagcgaaaaaaagatttgcgaatgaagggcttgccatccctgcataccaggcggagctggaacatctcccgttttcttctgagtccttttcctgtgtcctgtcagaatcggtcctcagtttttcacgcctgacatcctctcttcaagaaatttcaagagttttaaaacccggcgggatgctgatcggtatcgaagctgctttaaaaaaaccgatgccccctgcagaaaagaagcaaatgatggatttttacggatttacttgcttacatgaagaaagcgaatggcataaactcctaagatcctatggctttcaaaaaacagaagcgatgacacttcttccggaagacatggaatttgaaccaaccacagaaatggatttatcgcaaacgattgatcccatctattacgatacgcttcaaactcattatcagctcatgcagttatatagtgagtacatgggtcattgtatttttatcgcgtacaagtaaaacggcgtatcgccccctgttttcgtccaacctttttttcctatctatcatatgctgatagaaagtcaggataggaggggaacaatattggagagatattatcatctttgcaaaaaccatcaaggtaaagtcgtcagaattacagagagaggcgggagagttcacgtcggcagaattacccgtgtaacaagagacagagtttttatagctccgaccggcggagggccaagaggtttcggttacggatattggggcggttattggggatacggagcggcttacggtatttccctcggtttaattacaggggtcgctcttgctggtttattcttctggtaagcatagaacaaatgctagattcaccagacacaatgaagcccgcttatctagtgtaagcgggcttttcattttaaattttcttcactttttcaaagtactcttcaagcgttaaatcattatcttggatgacctttgcggcttttttgcctacatagcgcagatgccatggctcatattcatatttcgtgatatcttctttatttttcggatagcgaatgataaagccatatttataagcattgtcctgcacccatttcccgtctgccgtgcttccgaacgcttcatttagctcaaagccattgctccggctcgaaatgtccatcgcgaggcctgtttggtgctcgctttcacccgggtaagcaaccgcttcctttgccttcttttccccttttaggcttacttcattgtcaaaaatgactttctgtctgtcatacgaacggtaccctgagacagctgccagttcatagccttcctttttggcagcatcgaacattgtttttaatgcgtcggccgcttcttttctgatgtaacgtttttgaatcttttcttcaaaagaaaactctacatctggtatgacaagatcgctaggttcatagtttccgggcagtgcatattgtttattgacaagcgcgagtatattttctggattttgaatggtttccagaccatcgacttttttaatatcattgaaatactggctttccaatgaaaactcactgttttgagtgtttgattttttgctgtcagctgttttttgttctgtttgctttgtttctgctgtggttttcgtatccttttgagcatctccgttcgacatgctgcagccggctccgactattgccgttacactcagagcggcagccagtgagaaccatttaccggactttttcatattacattaccttccttttatcaatcgtttccgcattcataaagaagaggctgccggcacccagcacgcctcttgatatattttattgtgatacggaatgtaaagccacttctatcatatcatgaaatgtcgtttgacgctcttccgctgtcgtttcttctcctgttaatacgtgatcactcacggtgagaattgacagggcttttcttccgtgcttcgctgctaatgtatacaatgcagttgtttccatttcaacgccaagcacaccgtattttgcaagtttttcaatttgcgaatcgtcattgtagaactggtcagctgtaaatacgcttcctacagtcaccggcacacctttatcctttgcggcatcataggcattttttaaaagctcgaaatctgcgcaaggcgcaaaatcaacgcttccgaaagcaactctgttcatttgtgaatcagttgaggaggtcatcgccaaaatgacgtctcgcactttgacatctttacgaatagcgccgcaggaaccgactcttattagattttgcacatcgtagctttgaattaattcattcacataaattgaaatagacggaacgcccattcccgtgccttgtactgagatttttttacctttatatgtacccgtaaatccatacatgcctctgacttcattgtagcattctacattttcaagatacgtttctgcaataaattttgctctgagaggatctcccggcaaaagcacagtatccgcaatttgtcctttttcagcacctatatgtacactcatctcatatcctcctgtaaatctaaattatcatccagcccgtccattttacaacgaatgtcatgatgaaacaaacttcagcattgattataaaggaatatgtcgaaaaaagaaatgttcgaggatctgttaggcacttcctcagaaaaacggataatcggggtgttaatttgaaaacctaaccgcaggaaggaggggtaggacatgggtaaaaaacatcgtaaccggatcaccggccaaaaaaagaacaatcatatacctgaaaaagatatcattgcagctgaagaagcacacgggaaagaatattctgctgccaaacgcaagccttaaaactgcagaaaactgcgggtttccgcagttttcttttcattatgtcgtttgtacaatcagacgattgattttcctccagccggcgggaagcagttgataatatgttttcccttttctgccctcgtcaatcaggatcacgtcccctgtggccatgaatcttgcatcataatcactcggaacagtgtcgaatacattaaacaaagagaatgctcttttcagcacgtcttgatgatcgctcccgttcagttcagttcgatagacggctctgtagccctttttttcgccaaaccggggtgtctgaaatattgtcacgtcataggaacaagacttctttttaaacacggataacatcatcaagatcccctccctcttatttctttaacatattggcgtttttgctgtgttttcctctctctatttttgtcgaaaccgcttaatcttttcgtcaaaaccttttactaggaaaaacagaagcaagccgaggctaaagccgcctaacacatccgtcacaaaatgaacccccagatacactctgcttatgccgactaaaacagcaattacaccggctatgatatataccatttttttatgcttggacaaaaacgggaggtgtttcactaaaaagtaagcaataacaggatagacacaagcagcattcatggaatggccgctcggaaaactgaaggatgattcatgaaccagcggtgcaaaatcaggcctcactctttcgatccattcttttaagactttgtttaacagccgatctgtgccgaatactaagagcatcaacaggccgtcccatgtttttctgtagaaaaacatgcctgctccaatgatgacaattagagggagcagaaaagaagaagcaccaagatgcgtgatccccgtcatgacttcattaagccatggctgacggatcaaaacagctgccttgcttattgcttcatctgcagattgaacagcatttgtatgaatggccgcagctagaatgagaaagaaaagaaacaagctaacgggcttgtacaatttaaccacctcaattttcacagaagtcatagaacacgaataataaaaccggagctgaccgctccggttttaagcctcactcatcttcatccagctcttcatctatcatacatttttctatcaaataatcaaaggtaatatcagcgatttcaaacagctcatcctcactcggtatgtagccccgtcttgcaagctctctgtaaaaaaattcagcgatttcttccgtatcaatcacaagatctatttctttcatctccgtaccgcctccttttttatgttttatgaaaaaacaggctgaattatacccggtgttctaaacaattctttcagtcatatattgaataaaaaacgagccatgggaggctgacgctatgattgctaaaatgatggaagcactggacggagaaagatttgatatcataatggaaaaaacgctcaaaggaatgacgcgtgtgatgatttggggctgtctgccatattttttatatgtcttgatccgtatgttcacaaactaactgaaatgctcttttaaactttccaaaacaaacatcatcatgtctttatattcttcatcctgaaacatttcgtacagtattttgtagtcattataaatatccagaagctcatcaacaattgacacagcaaggatgtgaagggtatcttgatcttcatcatcgccttcaaactgaagaagagcagacgatgcgatatcttcgccgatctcatggccagtttctccgacataatggacaaacaacagctgatgcacaaactggtccatttcatattttctaagcaccagcgtgagatcctcttcctccgtttcaagccactctccatcctttaaacgggtcagttcataaatgatatcttcccagccatcttctaaatatctccaaatttctgttctatggccgataatgcgaaagagttcttttccataatcttttacataaacaacgtccccaataaggaattcatactcaatatcaagcttctccatgtcgacaatgacaccctcataatctttataaagctgaatagatgattcaaagtataaaacttcgttatgattgacttcataaagatagtgtttatcaatttggtgcacttttgtgatggtgccgactgttccatacataatgacgactacgatatcccctacttggaatttcggtttattttgcttcatggtgtctccccctcgccgcaacatttctcatacgctatcgtatgccgggtgaagccaattcgcatgggcatgaaaaccaaaggaaatatccaattatggtatgggggacataaaaaaatccgcagtgatctgcggatgaaacagctattatctgccgtgcacttcagactcgtattgatcccaagcttcatcaaacgtcgccatcgtgtgaaggtaatcagcattcagctccaaatatgaactgatttcatgataatcggtagatgtttttggaaagctgtgatcctcatacgcctgattggcaaattcactgatgctgtccttcggcttagggtgcctgtatttcaataaatagtgataaaaggatttcatgggtttcccctcctggtgtctgtcttttgttgttctattatacagttcaagtgtaaaattacaacaaaagaatactgaaacatgactcaggagaagtcaaaatagttgcgtttcaaaattctttctgtctccatgagctgctgatatgtcaggctttcaggcagtttttttgtttgaattaaaagcagctgatcctcaatctcctttaccgtgttttcctcttgataggtcataccgcaggaagaacataccatggcaggggtgtctgtcagttctatagcccttgttccatcagggagctcccagtacaccgtgttcctgccgggcaccgcttcaagctcgccgcaccattcgcatgttttcatgaagaatcccctccgcattcagtctctttctgttttttctgctgcgccaaaaatttcttttctttgagctgatctcttttctcacgccgattttttaatgtttcatgctccggatttgcgatgtatgcctctctccttttgattctgtctacattttcaggtgtaaacgaaacctctttgtcagcaaaaatggcactcagcccgatcggctccttttcgtcagcggtttcagggaaaacggactcaaaataggcgtctgcctgattggggatataattctctggttccggatatgacgtaatcacaccttcaaaatttcttaagatcactttgtcaggactttgtgacaggacatagtttggctgcagggcgattttaccgccgccgcctggtgcgtcaacgacaaaggtaggaaccgcatagcctgaggtatgacctctcagcccttcaatgatctccaaacctttggaaacaggagctctgaaatgcccgattccctctgacagatcacattggtaaatataataaggacggactctgatttttaccaagtcatgcatgagctttttcataattggaaccgaatcattaatacctgctaatacgacagcctgatttccgaccggcactcccgcgttcaccagcttttcacatgcctcaacggattcttctgtcatttcgatgcttgtgttaaaatgggtgttcagccagaccggatgatattttttcaatatctcgcacagatgatcggtaatgcgctgcggaaagacgacgggcgctcttgttccgattctgatgacttccagatgtggaatgctgcgcagctcttttaaaatatattctaaaatttggtcgttgatgagcagcccatcaccgcctgaaattaaacaatctcggatttcaggtgtttcccggatataagcaattgcagcatcaagctgttttttggggactcccattccgatttgtccggaaaagcgccttcttgtgcagtagcggcagtacatggaacattgattcgtgacaagaaacagcacacggtcgggatagcggtgtgtcagaccgggtaccggtgaatcttcatcctcatgaagcgggtcttccagatcgtattttgttttgtgcatttcttcagaaagcggcacagactgcatgcgtaccgggcatctcggattgtcggggtccattaaagaagcatagtaaggtgtaatatttaaggggatcgttttagtagaaattctgacgccttcctcttcatcctcagtcagattgatgactttctttaaatcatctaacgttcttacagtatgtgtcagctgccaaagccaatcgttccatttctcttccggaacgtccttccataactcgatctccttccaatgccgtttcggtttataccatttgtttttcaaacgaattcctcctcgcgcatattttgacttacagttgcttgcaccaaatattcatgttttcaaggccttcggctataaagcaattattgatcagccttccgccattttgataacctgaatggtacaacacagcattcatcccaaaagacgaagcacgggcgagagaaaatacatgaaagatatcctttccagccatttctttttctaacgcctcgattaaaaagcttgttaacgaatggccgcgatattccggcagcacagcgcaatcggttatttctgcatgcccaagctctggattgatttctgcgcttgctgagctgatcaggcggtcatgatcaagcatgatataatacaccgtatttgcattcatcgtcttttcaatataagcggggtcaaataccggtgttgggtacgtgcggaatacttttttatacagcatcgatagctggtacatgtcgtttgtttctgcttttctcatcgtaaaaacgggtgtactgtcgttgcgaagacggggcgctgtgcgatatatggcttcgatgatctcctgttcctctgtataagaatctgtttgtctccggctttctgaaaggtaacgtaccatgacacaagccgaatagccgagataatagccctttagatagccctccggcgcaaataattgtttggcaaggatcggctcatcatgctgcttcgcatagacaatgattttttctgcattctcttcttttgccgctgccaagatatccggcagggccttctcaatagctccgtcataacggaccactctgattcgtttattaaagccgtcatggtccaaaactgctgtgacaccgctactctttattgacttgagcatccgcatcctccccatctgtatgaagcccgcaccaatccatgacaaaaagtgcaataattttagcagattctatcatggcttcaacctcaatgtattcattggcctgatgagccgtttttgtttcccccggcccgaaaacgatcactggtgtatctcctgcatggtacaaaagccctccatccgttccccacggggaagcctcaataatcggctctgtctgtttcattttttgataggctgattgcagcacagaaattaaagggtgatcatcaggtaaatcattcggcagccattgagcgccaaaccattcgacttgtacgggatggcgtttaaaccattcgtcatggtattctaaatccttcagccagttttccaattcaagttttacagcttctggtttctcatggggagcaattccgcatctcccttctataacgacacggtctgcaactgaagatggccaggcaccgcccgagatcgtgccgatattcaccggtaccggtattgggatattgtcatacagcggatctgaaattctcgcattgcggactttctccagctcttgtatcgctgtgataacgtgcatgcttttttcaatcgcgcttaccccttcatagcgtgtgcccccatgtgcggctaatcccttcacagtgatccgaaaccacatcgaaccctgctgcttaataaatagtttcatattcgtcggttcaggaatcaacgccccgtcagcacgatagcctctcatgatggcggacagtgtaccggcgccgccgcactcttcatctacaacactctgaaacaatacatctcccttcaatttgacatcgcaagcgtgcagggcttctaaagcaaaaagaagggctgtattgcctcccttcatatccgttgagccgcggccgtatattttaccgttttcttcgacagcttgatacggttcatacttccaatcctttacgcttccttcaggcacaacatcgatatggccgttcaaaatcagggacctgcctccgccggctcccgtttttttagccacgatattcgggctctcatgaaaatcggatcggttagatttaaagtagggatgctgttttaattgctttatacttggctcccatacatcaatgtccatatgaaattgccgcagcttttcaagcacaacagcttgggcgttaaactctgaccccaatgtgcttttttccccaatcagccttttgagaagacgaatggctttggccgaatgctgatcaagccacccgattacttttctttcaatgtcttgcatcctcattccccctcttaagaaaaaggcatatctattttgatttcagcatctgtcagcctcgtcacctcatcgattgtcgagccattcatcagctcttttaaaatgaagtgatggctatcgacctcaagaaccgctttttcggtaataatcaaatctacacagcctgcagcagttaatggcagcgtgcatctttctgttaatttaggccttcccttttgatctgtatgactcatgacgacaaccacttttttcgctttttgggcaagctccatcgccccgcccataccaggcaccttttttcccggaacaagccaatttgccaaatctcctgattggctcacctgcagggcgcctaaaatcgtaatgtcaattttgccttttctgatcatcgcaaaagacatggttgtatcaaaataagaagccccttttacagcgcggacaggatagcccgcggcgttgcataaatgcgcatcctcttctcccttttcgggactttctccaatgccaaggacaccgttttccgcttgaaacatgacctgcatgtcaggcttcaaaaagttcggtaccaaggatgggataccgataccgagattcacaatcatgccctgcttaatttcagtagcagcccgttttgcaatctgttctctttctgctactcccaagcccatttccacttcactccctcgcttcttacaactccctcaacaaaaacccccggtgtgacaatcatttcttcagaaatctcacctatcggaacgatacgctcagcttcggcaaaggttctcctggcggccattgccataagcggattcatattgcgcgcggttttgtcatacgttagattgccgaattcatctgcaatgtaagcattgatgaaagcaaaatcagccgtcagcgcctcttcaatcaagtatcgttttcccgccactgttacgatgtcctttttttcgcaaaccatttgattatcaatgcccacgtcggttaaaataccgccaagccccgctccgccggcgcgaatccgttccgcaagcgttccctgaggtgaaaattgaacctctaacgtcccctctgtcatctgttttccggctacaggattggaaccgatatgcgaggcgatcagggttttgacccgttgattaacaataagcgggccgatccctatatccgggaaaccggcgtcattgcagatcacagttaaatccgttacaccgctgtccaatatcgcttcaatcaatgaaggaggcgacccgactcccccaaaaccgccaaacatcagaaccgatccatcccgaacatctgcaattgctgtgtcaatgctgattgctttttgaaatgacgccatttaatgtcaatccttttttaagtttttttcgaccgctgcaactgtttctgaaaaaatagagataagctcttccatttcaccgtctgaaatggtaaaaggaggagcaataatgacagcatctccttctccactgtctattccagctttggaaggataaacaatcagcccgcgttttttcgcctcgctgacaataatctgagttatcgtctgctcttgcggaaacactttcttcgttttttggtctgccacaaattcaacgcctaatagcagtccttttccgcgcacatcacctataatgccgctttgagatgccgcctcatcaagctttttcttcagcacagcgccctttttttctgattgtttgatcaagccgtgctttaacacatatcgcaaaacttcaagagcagctttggctgaatagggatgtgcactatatgtgtgaccgctcataatcacacctgacccttgttttatcgtttcaataatagaatcagatacgacggcagcagcaataggcgcataaccggcaccgagtcccttccccagtacagcaatatcaggtacggtgtcccaatgctctgtcgcgagcatccttcctgttctcccaagccccgtcatcacttcatctgcaataaaaagcacatcgtgtgtgcggcatacctcacttaatctctcataatatcccggaggcggagtaatcgctgctcctgcagcaccaataataggctcagccacaaagccggcgatgaattggcttccgattcttttgatcatagtgtccagttcatcagctgcagtctgaacaaagtcttcttctgtctcgtgattcagccgataaatatgtggagctgagatagctggataccgttcaatgagatgggtgaaccggtatctcctttcataaaaaccagataatgaaagcgctcccaaagttattccgtggtaactgctccatcgagacaaaaagatggatttttgtgtttgctttttttcctgccaatactgaatggcgattttcatagctgtttctatcgcttctgatccgctgttgacaaaaaaagaccaattcacatctccgggcagctcctgtgccaagagcgcggctaattgctcggcgggctcactcgtaaactgtgagcggtaagcaaaagacacctgatcaagctgttctttcagcttctcagtcacatcacgaactccgtggccgatattacatgtcaccgctcctgacgagccgtcgagatatttttttccggtctgatcataaacatatgaacccttcgcataactgacaaccggataggccgagctaagctctggcttaatcaaataactgctcatgctcccacctcaaaaccccttttaccatattgtatgagtgtccaaatggcggcatgacgttccccgcaaaaactttttcacataaaaagagccttcctaatagggaaggctcttttggaatttcagcatctagcaaataaaagcggctccaacaataattaataaaatgaacaagacaacaattaacacaaatgtatttgtcccgcagccaaatccgtaaccgtacccagagtatccatacatgctgttttcatcctttcttatcacgatatacggcattttatgcgggccaagtcccaaatggtttgtgcaaacgcctatttcatgtaaggaaataatgaaatacagtatgcacccgctcatattttttaaacgtcagcttttcgtaaaactgagttgcaccgtcagtgcttgcagcaactaagtaggctgcttccattcctagtgatttggcgatggacagcatttctttcactaagatactgccgtagcccttcctttgaaactgatctaaaattgccacttcttcgattttagccgttttctcttgatgatcgataaacagctcgccgcacccaatgggaactttctgtgcctggtcgctgtaacaaacaacaagaatgattatacctgcttcatagaaaggatattttctttttaatttttgttcagcgattgcttctccaatataaatggaatcgtaaattttcataatagaagatccgtcgctaagacttttcgccgtcccccatgcggttaaaggatgtcccatctgccccttccagtcactaagcttcatgtcatatagtagctcatcctcgacgacaaaaccgctttttacaagcgactgcttcaaaccgagcggaaaaacatgctgcggcgacgcttttaaatggagataattcgcatcaagcagctttggtacggagggtaaaaagttaagtaaccgctccaatggaaacgtatcatggagctgaacaaagttatgagaaaaaatttgcggaagctgcggatctctgtatacgctgtaatgatcaaacgatgccgattcagacgttaacaatatatattgatgttccgtttttgaataatgtcctgtcatgaacgtctcctttttatgacctatacctttactctgttgcaatattcaatttctttataatctcatcgtacaccggataaaacggctttccaattggaaattgctgaatatttcggaaagaagcggagattggcttctgatgtaaaaaaaacttccttgttacttgttcactaatcgggtgaaagacgccgtttagaaacaaaaacggctcgcgttcgatgaaaaacagacgtcggccaggcggatttttgatcaattcagatcgtttccacgtaatcggcggcccttccggaagcgcctccatttcttcttttccaattgtcactatgtcttttctttgaaattgataaaattgaaacgcatactggtccacaattcgccttttttttccggcttcgatataaaatattgcaggatggtcagcttcctttactaaaatataattcggaatgtttaaaattttgccaatcctatattggaataaatatgggtctggaacagcgacagtccgatttagatacaaaaaaccccacttttctccaacaggatgccttacaccctgatcaaaaaaatacacattttgatctgaaccttttacaaaagagccgtcaatcaaatcggcgggcagaaaccgatatgcattttgaaatgaatctggggttttataggttgtgtctaatacttcatttatcggcagaaatggggtaaagttgttgagtctcgcccaaaaaattgcgtcgccatgattccaatgcttcatatcatcatcccagtagcctccaaatttatgatggatgagattaagtaacgaacggcgatgcataactgagcaatgatcaacttgaaaagcggcctgatcaagcactgcattggcatttctgtagaaatgtgagatttcctctcccctttcgtttacatgtacaactttttgttttgaatagaccgcctgcgcttcaggcttatgtgaaaactcttgcaccatacggctcagccgctcaggatgataaacagtgtcgtcagtaagataggaaatgtaatcgccgtctgcaaatgggagcgcactgttaattaatgtggcataacgggctgtttttaatcgatctgcaggatgcacgaaactgttatgatattgaatgcgccggtcatggagatacttgtgaatcaccgcagttgtttctgcattcgaatgatcatccatgataaaaagctcccaaagatcatgcgtttgctgtatcacgctttcgatcgctttttgcaaataatcgggtttgttgtaacttgttaaaataatagacactttctctcccatctataccgcctcccaccgtcaaacataaaaacggctccgcagcaagcagagcctctgtcatcatttaaaaagcaccccagcttacaacacttgagagtgaaacatgagctctcgtgttatttaacgggttttggaaaataaccaaatcagtcagaacttcttttacgatgacattttgaagtgtatctccgttgatcaaattgacttttgaaaccggtacgcccagctcttttgcaaaaacaagctggcgtctgaggtcagatggatttccttcagaagacgattgacgtatcagcagaatcagcaaaagcaaaataaaatgcagatcatcttggttttcttctcgatccacttgtttctctaaatccaaatcatccctctcccttatccttatctctgtttcacaatatgtgcgacttcgatttatggtataggctatgtccactccattaaaaaatcagcattttccttaaatagatgaaaaatagatcaggtacggcgttcgactcataccaaataacagccggaagaatatgaataacgtgagttcactatcgaataggaggtgtgtgtaatgagctctgaaaatgcacagttaaaaaaggatttaattaaagccgttttaagccctttatttccaactgcaacagaaggaggagaaaatatggatagtaatcttaaagccttgcttgatgctgccatcgatcaaaaagtagatgaaagtgaaacggttacggcagaatctattttagacccttctcttccggcaagatggatttttgccagaattacgccaggcacgacaatcagcattgtgactgattcaggtgacatgatcggaccggttgttttcgttgctttcgatcaggttcacgggatcgtatttgtaacacaggaaagctccgtcactccggcaggccaagctacaacattaattgatgtagacaaagtagaaagcgttacgttcttttcataacatccgatgaaagtcttgtatatccagtcgggatacggaggaatatacagttattttgatcgctgggctgaagaatgttttcagaacactcatacagagtatatgattgcagataaacctgaagcagaatctttgatgaagatcgaagcgtttcagccggacttcacacttatgatggttggagaccgcgttcctcacgactggctgacctggttaaagggtaaggatatccccgtgtatgtttggctgaccgaagacccattttatatggatatcagccttcaggtaattaagcttgctgacgccatattaacgatagaacaaaatgcagctctctactatcaagagctcggctaccagaacgtctattatgttccgataccagttaaccatcggctgtttaaaaaaatgggcaccgaacattcctatcattcaaatctgttaatcatcggctatccttaccctaatcgggttcagcttacgaaagaagcggtccatctgccattcacggttcgggtaatcggcaaggaatggggaaaatatctgcctaaaaaagtgctcaaacagccgcatattgatgtcgtcagcacatgggttccacccgaacaggccgttcattattataatggggcagacatcgtaattaatgcgcatcgtccctatcattttgctttcaaccaaaatactatgcgcatcaaaaatgccagttttaataaccgaacgtttgatatcgctgcatgcgaagcatttcaattaacagatttacccgcggcgcatcctttttcatcctttatttcttatcacggcatgaacgactttaaggaaaaagccgctttctatatcaaccaccctgaagaacggcaaaaagctgcagcagccaattataaagagatcgtacccgcatttacgtttgatgagcttcctgcaaaactaaaagcgattcatctggcgctctcatgaaaaatcgttcattgctatgaacgatttttttattcatagaaaaaagcagctgcacaagctgctttctattctagccgtcagaacggtctttcagcttcctcggatttacctgtttatgaagatcaggcatttcgccgagatgctgtgcaatttgttcccacgatacaattttgaaattttgattgacggcttgtccgttatcgatattttcgccgtcctgcgccacaaaaatcccgtacggatattttgggccaagtccgaaaccgagaacatcaataccatccgtgtcactagtaccgtctatcttctcgccatctgtaatctcaaagttggctacatagcgatttttcccctgccgttcatacattgcatagctgttatttccttgacttgaagccatgagatatcctttgccatttggtgcataatagattgtcagtccttcaatatcagctgtcaaatgatctcctgtcgcacggtcaacaacctgcccctttgaccctccgccgggctcagcgttaaatttccagatggcttcatcttcctctgctatgtataggttcccatactcatcatccgcaacaaggccttcggtctgagaattcaacttaaattcacgcacctttttccctgttacataaccctttccaccatcaacaatttcatactgctcaaattccccttgtttgcctgtcactaatgcgtaaaatgctcctgttttctggctgtgatacaagctgaatccataaacctcagaaatattggtggaaataggatggttcggatctgtaatgcttttcaattttcctttatccccgtctattgcatatacttcaattgtattttttccttcggaccggttggatgcggcagcaatatcaattttttcgccgttcaatggaaaatcatagcgcagatcgacattattgagcttgccaaactcataagaatgaagctgttttccgtctaaatcatacacaacgagccctgacttcttatttgttgtaatcaacttgcttttttccgggtgtttttcatgaacccaaatggccgggtcatctgctgcatcatcgccagatgcgaccggatctgtctccgtgtgtgcagtcactttgaaatgatgttcctcattcacataatgagccgacaccgaggttgctgtcaggctaagcaataaacccgcggcagtgcttagcagcattgtttttgaaaccttcatttggtaccctcctcttttatcactaacactactattgtaaaatatatacaggtgattaccgtgaggaaaatgaacctttttttatagggtttctgactcataaacaacttattccccaaagaggtggtgagatgactttgccagatttacttttgcggagcgaaataaaaatatgttgaatatttagtacattgtttatttagttttgttttttcctagttacgtccgtttttccattttctattaaaaaagaacactttgtgacatgatcattcccctaaattttgttttattggttgctttcattaattcgattacaaagttgaacatatgatgcatggtagagaaacgagagttggaggataagccatgcctaaacagcaaacagcagaactaaaaccatttttccataacaaaacagttttagtcactggcggaacgggttcaatcgggagtcaaattgtcaaacgccttttgctgcttacacctaaacaggtgattgtattcagcaaagacgacagtaaacagtatgtcatgagccaaaagtatgcggaggataagcggctattatttgtacttggagatgtacgcgatcacagaagggtgaatcaggtgatgaaaggcgtcgatatcgtctttcacgcggctgcgctgaaacaggttccgacatgtgaggaccatccatttgaagcgatccagaccaatctcatcggcggacaaaatgtggtggaagctgccctttcacaccgagtgcagcatgtcattaatatcagtacagataaagctgtatctcctgtgaacacaatgggtgccaccaagctgttatctgaaaagctgtttcatcaagcaaaccgccacgtccaaaacaaaggaaccttgttttgttcggtccgctttggaaatgttctcggttccagaggttcggtcatccccatattatttgaacagatgatggagggtgaacccctgaccatcacagacaaaaacatgaccagatttttcatgtcaatagacgatgcagctacattgacattacaatcggctgctattacaaaaggcggagaaacctttattttcaaaatggaatcactgaaacttgaagaactgattcatgggtttgaagaatatgcatcgcagcacgggctcccgcggccggctgcagtagaagtgggcaagcgtccaggtgaaaagcttcacgaagaattaacatctccacatgaaattgaatcactgtatgaatggggcaacctttatgcgatccttccagagccggaaaaacatcctgactttcgcaaagtcaatctgcctgggtatcaatcagatcaagccccgctcattacgaaagaaagaattgctcagattattgaagaattgcatcaagagaaaaaggcataaaaacaagcctgtctatccattaggcaggcctgtttttaacactttatttattaaagagatgcagatagctttcgtatccttcttcttttagcttatgcttcggaacaaaccgcagcgctgctgaatttatgcagtaacgaagtccgtttggaccaggtccgtcattaaatacgtggccaagatgagaatcagcagttcggcttcttacttctgtgcgaatcatgccgtggctcgtgtccagtttttcttccacttcttcttcttcaatcggctttgtaaagcttggccagccgcagtgggaatcaaatttatccttggatgtaaacaatggcttgcctgacacaatgtctacatacaacccttcttccttatgatcccaatattcattttgaaatggcggctccgtgccgttattttgcgttacttcatattgcatgcgatttaatgactttattttttcttctttattgtacgccatttatttagccccccaatgctcgctgataaatcccgctcgtccggaacctgtccggtagcgctgataatgtgctggattctttttataaaaatgctgatggtagccttccgcttcatagaaaggttcagcttttaaaatgtccgttacaatcggatctttaaagatgccgctttccgccagacgttgcttggaagcttccgcaagctccttttgtttatcattatgataaaaaatggctgcgcgataggaactgccgcgatcagcaaactgccccccggcatctgtcggatcgatttgctgccaaaataattcaagcagtttttcataagggaatacatcaggattaaacgtgatttgaacggcttcacgatgtcccgtcgtttcactgcacacctcttcgtacgtagggttttcagtatggccgcctgtatacccggacaccactttttcaattcccggctgttcgtcaaaaggtttaaccatacaccaaaaacagcctcctgcaaatgtggcgatttcttttttttcagacatactggtgcctcctttgttaatacgtggtattattatattatagcatgtaaaaatagaatgaaaatgattctgcttttcaataaaatctataggttttaagcaatatgcttatgtaatggaggttcacaaatttgaaagtaagaacacagatgatgtacgatatggaaactttactccgtaaagtctttaaacaaatacgcaatgaaatcaatgaaattttagataaagagctgtcgcggaatgaattcaccattcttcgaatccttagtgaacaagggcctaaaaaagtcactgaatttgcgcctattttagaggtatcggcaagccacattacggctgtgaccgatgcgctggtagaaaaggaatggattacgagaatcagatcgaaggaagacagacgcatcatccgcattcatatcactgaagcaggcgaaaaagtccttcagcactttaacgagaaaaaaacggaatatttctttaaacgctttgactgctacactgatgctgaacttgccacgttaatcgagctcttcagcaaacttgataaaaaacggtgaaaaaaagcacataccgatatataggtatgtgcttttcgcagtgcttcacttatttttcagtaaacagcttcattgctttccagcggccatatctataatacaaaaatgccgcgcagctgctaaataaaaaactcattccgattccaagcccgattcctttttgtccaagccaagctgaaaatagagctgtgaaaggatatctcaacacccaaaacgagattaaatttaataccagaacctgcagcatcgctcccgcggccctgacgattccgttcagcacaaaattaatcccaataaaagggtagaaaaacgcgatccacttcaaatattgttcaccaaatgcgaccgcatcaggctcactgataaataaccttatgagatatttaccaaatacccaaatcataaccgcaatcaccagcatgcaggaaataacagctatcacacccagccttgcaattgttcccactcttttttcgtttccgattccaatattttgccctgccatactattgacggccgtaccggcagccattgctggaagcgtgatgatgctatcaagccgctgcaccgcgccaaatcctgataccacgtgatccccgtatgagttaacaacactcataatcgccatcataccgcctgtaatcaccatcatctgcagacctgccggaatcccgagtttcaaaatcagcgcggactcttcccacttgggcattctcggaatcgagaatggcacaagcttgtgtttgatgacataaaacaacccatacaaaaacgcaatgccctgtgacaaaatcgttgaataagccgctcccgctattcccatgcggaacacagaaataaagagcggagcaagcactgtattcagtacaacagcaaacgcaataaaccggagaggtgtcttgctgtcgcccagcgcacgaagcacagtactgataaagttataaccaaacaaaaataaaatgccgataaattgaatctgtaaatacgtctcagcaagcggtatcattgactccggcgtttttagaagacgcagcaaaagctctgagagaaaaaaaccggccgcgccgaatccgatgcttaggcctgttaataaaacaacaaaagcgttaatatacgacgccattccttttacatcatcttttcctttttgctgagataaaatggttaaagtcgcattgttaaggcccaaaataaaagacagcacggtcaaaacaatcgtgcttgataccgcggctgccccaagggcctttgcccccagtaaattgccgatccacaagctgtctataaattgaaaggaaacctgcaatgcgtttccaagcataataggcattgaaaacagtacaagctgtttcagcacgttcccctgtgtaaaatcgtatgctttcatcttttctccttgtgttctcaaattttcttcggaccgcacgaaaaaagagacgttgtttcatgtctcttttttcatgacttatcggttttttttcggtctcgcataccgaatgtaaacaccatcacacttaggaacaaggcacaataggaaacattcaaatacatttgatccatgtcttcagcagccagatgatgataagcaagccagccgaagtacagggaaaatgtaaaggataataaactgaaatactggtaaatctttttcattttcagtcacctctattgtttaggatggtaataggaaaactcaatttcatctttttctaaatttatcttatccgctttgacatacattccattcgttaaaggcatttctgacaaacgcacttcaatgcttttatctccggggtgaacatggacaaatgacggcaattcataaaagctgtccatataatttaacacaaagctaattggtatactcaatttccctaacgaaaatttcgtgacattcagctctacatcaccgttttttttcacggtcggctcaaaagcgataaacgcatcaatagacgtggaaaatgccttgattttccctgcgacatgaacatcatcatcaatctctactttataatcaagcttatttgatgctttgtcgtttaaatatgagttaacaaacgcagctaatgattcttttgtgcttgtcacttgaaatccatactcgctctcagatgaatccttcacctgagcctgttcccccgggagcaaaacaagtgccacaaaaccggcggcgaggataaaattaattgcaagcaatataaaaaacagtcgcttccacttattcatgctgtcaccctactctttcggtaatccttcttttttaatggcttgatagacgcgctttgcgataagagaataacccgtaccattaggatgaaaatcatcttcctcagaaattcggctgctgtcccttttttgattgaacaaatcttcgatatgaacgatttttgcatgtttatcttttttcagctctttttcagcaatatggttccaatccgtgacgacaccatttatttcatttagttctgataatgtaaacgtaaacggattgtacatactgacataaatcagctcagcgtgatcattcagctcgcgaatttcagaaatgattttttcaaagcgcttttcgtacggtttttccgcttcctgaaacggttcaacggttaattgcagaaagttttggcgaaggattttcatcaaatcattaccgccaattgtaaaaaagacataatctgcgtcctttatgcctttttgaacctttttatcttttagtttttctaataaatcatccgaacggttcccttttacagcataatttttcacgtcgaccgttttgacttgtttatctgaccggatagaatccgccaccttgccgacatatccctttccttcgggatctccgactccttctgtcagcgaatctccgacagccgctatgacaatgtgttcttttgttttcgtttcatgggctttttgttttccctcagatgatgtacgtatgctcgtacacgcagtaagaagcaaaatcaaactggccatgattgaaaaaatgcgcagcttcaatcttgttgctccttcccattctactagtggaaagtgtatcatgttttagaagatttgcaaatgcctagtctcttagcttacttgagtgtactggctgactttacatcggaaatgatatcatcgtacggtgtattctccactccattgtaatctttcagcaccttaccgtccggacctaccaaataaaaagaagattgatgaatcacttggtcctctccctccggcttctttacgatcgctttaaagctcttaagtgcgaactcctcaatctcactctggctgtatccagtgagaaaatcccagttatcaaaagataatggataatttgcggcaaatttcttcagctgtttcggcttatcgttttctgggtcaacactaaatgatatgatgcggacatctatattttcggctttcaattttttttgcagatcggtcatatgagcggtcattggcggacatacagtttcacaattggtaaaaataaaatccgccagccatacttttccttttaagctctctaaagaaacgttcttgccgtcttggttttgaaatgtaaaaggctccacctcgtaattgagcggatttttaatctgctgtcctccgcatgcacacaaaaacagaaaaatcagcccagccgttaaccccttgataaccttcatgacatccatcctttccagccagcataaaaacgctttctaaaaccgtccttactgtcccatgtttgtattcgatactgagcaaaaaaaatcctgcatgcctccccattaacgattacaaaggagggcatgcaggtaaaaaacggcatgttacgcgttgtgctttaacacctcttgatgaaatacagcctgataatctgcccacttcatccggcgcttcatataatgtcggaaagaatacacttttgccctgctatttgatgaaaacacttcttttaagtagaattgcaaatggtgatgtaacataaagaaatagtgctcatcttcctttaatacaggtatttctgtcactttcacctgaatcccgtcaccgcgtttgaactctaggcttttgagtaacaagctatcaatcctcttttttgtttttcttctattatatatgatgccagccgggctgtctgtcattttgcgcggttgtgtaaaaaaattagattagcaaatggaacaagtcctcatccttgttcacctctacataatgaaacggttttttgttcatccgttcaatcagcggcccataatcggctttgttctgcagctcgatgccgacaagagcaggtccgttgcttttattatttttcttcgtatattcaaaccttgtaatgtcatcattcggcccgaggacttcgtcaagaaattcgcggagcgctcccgctctttgcggaaagttgacgataaaataatgttgaagaccttcaaaaatcaaggaacgctccttcatttcctgcattcttccgatatcgttattgcccccgcttaccacacacaccacgtttttccctttaatttcatccttgtacaaatcaagcgctgcgacagaaagagctccagccggttcagcaacaaccgcacattcgttatataattcaagaatggatgtacatacttttccttcaggcacgaggagaatgtcatcaacgacagtttccagcgtccggaaggtttcctcgccaatttttttaacagccgcaccatctacaaacttatcaattttatcaagtgtgacgacatgcccagctttgtttgattcaaagtaggatgccgctcccgccggctcaacagcaattacctttgtatcaggagacacgtttttcaaatatgtacctaccccagagagaaggccgccgcctccgacacttgcaaaaagaaaatgcggttctgtatcaatgtcgtttaaaatctcgactgcgagcgttccctgtccggccatcacatccggatcatcgaatggatggataaacgtccgagattccgcctcacagcattcagcagcgcttttatacgcgtcgtcaaacgtatcgcctgtcaaaataatatcgataaatccttttccgaatagttcaacttgagatactttttgtctcggtgtagtagacggcataaaaattttcccgtgaatgccaagatgtttacacgaaaatgccacaccttgagcgtggtttccggcacttgcacacacaactccgttctctgtctgctcgctggaaagctgtttcattttatgataagcccctctgagcttaaaagatctgacaacttgcaagtcttcgcgttttaaatagatattgcattcatatctctcagaaagtctgtcattcctctgcaaaggtgtgtgaatgacaacgtcctttacgttttggtgagccttcaaaatgtctttcacttggatgagagagttttctttaagcaacggtttcatgtacagattcctttcttgttttaaatccctatttaatatgccattataacatgaatattcaaaaaataagacaattatttttatttaataattaaaaaaatacagactatgtccaccacatcttgtggtaacttctgttcaaccattatcctgcagagccaagaaaaaagatgatcgtaaaataaagggtgttttcaaccaaaaggcatgatataatgaaaccaattagaaccaaaaggagccaattgatgaatagtgcaccaaaactcaatacatttcaacatctaatcggagaacatcaaactttcctggaagcgaagcgaatcgccaagcagttctcgttatcggagcttcctgtcttaataacaggaaaaatcggaacaggcaaaaatcacttcgcacatgccatacacttggaatcttcgagaagcaatgaaccgtttataagcgtcaattgcagcacccattcggaagaaacccttattcatgagctttttggccctaacggaaacacaggtgtttttcaaaaagcggtacgaggaaccctttttcttgatgatgtatggcgcatgcctgcttctgtacaagctcagctgttaaaagcgcttgattcagacacggagaaaccgcgaatgatctgtgcttctgcagaccgatctgtggaacatacattcaggcaagacttattctacagactgaacattttaacgctcacactgcccgaattatcggaacgaaaaagcgatattccgcttttgacacagcattttctctcaaattccggtcagcaattgttaatcgatccctccgtttttcccgtgcttgagaaacatgcatttgaaggcaatgtcagggaattaaaaaacgctgcagattatatggcggcagtatcaagcggaggaacgatccagccatatgacctgccgccatatattagaggcgcgatagacggaaaaacgtcgaagaaaaaagcgaagctgctgactttaatggaaaaagctgagtttttgtttattttggaaacaataaaagtattgaacgaaaaaggagaacctgccagcagacggatcatttctgaacacagcaaaaatacccaaacctcgttaactcctcagcaggtcagaagccgtctcgactatttggagaaaaaagattatgtcaccaaaagccgcggacgcgcaggcacaaaaattacctttgagggcttgagctttatagagacgttaaaaaatcaaatgatctagcgatcgaaaggagaatgcacttgtttacaatcaaagaagagatcgccaatgcgattacacacggcatcggtgtcctcttatccatcccagcattagtgtttctaatcatatttgcggctaattacgggtctgcatgggacattgtcagctttacaatattcggtgtctctatgctgctgttatatttgagctccaccctgcttcacagcatcacacataaaaaaacgaaggacattttggagattattgatcatagcgcgatttacgtactcatcgccggaacctacacgccttttttgcttgggccgctgaaaggcacactcggctttaccctgttggttatcgtatggtcacttgccctaggcggaatcgtttttaaaattttctttgtgaaacggtttatcctattgtcaaccttcgtgtatttagtcatggggtggctgatgattattgcaggtaaacctttatatgcttcactgagcggagcgggtttcagcctcctttttctcggcggcattttatactctgtcggaaccatcttttacatttggaaaaagatccccttccaccacgccatttggcacagctttgtattgggcgggagcgctgctatgtttttctgcgtgctcttctattgtgtaaaggtgccgttcctttcgtaacagtaacagaaaagcgcagtcttcacgactgcgcttttttttatgcacgtaattgtttttcattggcaggtatataagcttttgaaaaggacaattcaatgtctgccggttttaagcgtttaaaaaacgagcccttttgcatgttatctgttcctttcgtttccaccatcaccaacggaagatgatagcgggccgcaagttctacaggatcaatagaaccatctagtgaaagaatcaggctttgtcccttttccagctgttttgtcacatcttcatataccttttctgaatccccgtctgaaatcacatccatccgatccagccattgcccgataaaaggcaagcggaacacttttgggttggcgataaagccggccggttcctcaatatatccagcaattaaggccagttcagccaaacgcaaacggggatgcacatacaaaacaggaccgtgtggtattggctctggctgatggatcgtcacaactgaaccggagatgccgatacagccttccaaaaacgcctttggctgttcgtacacaagagtcatctgttttttgtatgacagacggggatcgagcattgtttgattaaataattgtttcatattttttaacagcatatacacaatataaaccactagaaggctgtagcgaaccaattaaaatcctcccgctttagaagaattctttttttcatacattagaaattcgtaatcatacgggtttttttcgtctttggtcccctgctcagaagaaaccaacttccaattggattcatcaaattcagggaagtgacggtcaccctcaaactcgtgatgaattttcgtcatatacagtctgtccgcataagggaaaaggtccgtatagagctgagcccctccgatcacaaagcattcttcagggcctgaacaaatgtccagtacatcctttaatgaaccgacaaccgtgcatcccggaaattctgaagccggcgctgaggtaacgacaatatttttccgatttggaagcggacgtccgatcgattcaaatgtttttcggcccataatgattgaatggcccgatgttactttcttaaagtatgcaagatcattgggcaaatgccacggcaaatcattgtctttgccgataagcctgttggcatccatcgcaaaaatgaatgaaatcatacgcttaccgccccttttatatgaggatgcggatcataatcctcgatgataaagtcctcaaatgcaaagttaaaaatagaatcaacctttctggcgaaacgaagctgcggaagcggtctaacatctctttcaagctgcaaattgacttgttcaatatgattttgatagatatgaacatcaccaaatgtatggatgaactcgcccgattcaagcccagtcacatgagcaatcatcatggttagcagggcataagatgcaatattaaacggcacacctaagaaaacatcggcagagcgctgatacaactgacaggacagcttgccgtcagacacatagaattggaacaggcaatggcacggcggcaacgccattttatcaatttcaccaacattccaggcgctgacgattaagcgtctggagttcggatttgtcttaatatcttcaataagacgggaaatttgatcaatggtttctccatcagctccccgccaagaacgccattgggagccatatacaggtccaagttcaccgttttcatcagcccactcattccagattcgcactccgttttcctgcagatagcgtacattcgtatctccttttaagaaccacagcagttcatgcgcaattgatttaaagtggagttttttagtggtgagcatcggaaagccttcccgtaaattaaatctcatttgatatccgaaagtgctgattgttccggtccctgtccggtcttcctttttctcaccatgctctaaaacatgtctgcataaatccttatactgtttcatttttttcatcctttaaaagtagtcttctagtagtgtaacacaataaaaaatcatttctgaacccagaaatgatttttttatagtcagctgacaacaggcttttcatcctgttctttttcttcatcttgcagatcctgatgcgtatgtgcaattctgctcgccgctgctgcagcaagagctgccacaatatcatccaaaaaggtgtgaataccgtctggactttcatcaagttccttaataattccaatcttctctttatccaaataaccgaaattggtcaaaccgatcgacccgtacacattaacgattgaaagcggaataatttcatctatgccgtaaagcggttcatctgtttcaacaaggtgctgcagcggctcggggagaagcttctgttctgcaagctgatcgagtgcaaggcctgtcaaaacagcatgaataatttcacgtttgttcaggactttttctacattctccatgcaaacactgagcggcagatttggattgtatttttcctgaagtttttgaacaatccgtgcaatatcttctatcataacgccccgtttgttcagcatatcctttgttatatcgaccatttcattcattgtgtactttttcatgtctaatggcatctcctttaggcactcatccagttgggaggcgtgttgcggtcccaataaatgctcccaagctcatgatgtgattgaaatccatcttctgctgtatgataatgaaaattaaaccagtagccgtcatgaggcgggtggtctcttcgcacatggaatctgagaagatcttctccagttgtccgattgtaaacgttgaaaattttttccgttttgcccgctgaaggcatgcttgagatcacaacatcttggtacgcctcatcatcttgcaatgtcgctaaataatcactaatcacattttcgatttttggcaggatctctttccgatagtcatcctcaatgacaggagcgattctgctgccgaattttaaaaaggactgatcctcagcgctgtcaaggagctgttccttgtacgattgaaaaagcagttcaggattttgcctgtcatccgactcatcatcgtacaggtcatgctcatcataaaaagcggtgtaatcattctgctcaagactgctcggctgtccggaaggcttgtccgccataagggcagccggaggagatacgagcccgaacgttacaatggtaaataaaaccacaagggtctttctcatccacaatttcatgactgcttattcctctctattttattgtcatgtttctcttattttagcacatccaaaacatgcaagtcatgtactatatgaaactgatatgcaaattaggagattcgttgctatgcactttgtgtaaaaacgcttacaatattccatgaaaggaggctttccgcatgattgacgctctgtttgccacagtttcactcttaacattattatactttgtcgtcatggaggtcaccgattaacagaaagcccgtgatatgaatcacgggcttgtttgaatgacgccataatggaacagtgctgtttttcttttcatgacgttaaaaccaaactgttcaaaccgcggacttttccagtggtcttttagcacaacgctttttctggcgactcgtaccgcttcattgatacatccttcgtgtaaaactgaatcctctgccaaatcacgtaaaggcgcgatgccgtcagaggtctctacaggttcatgaaacattggatcgaaataaaccacatcaacagagttgtcaggaagctgtttgatgtattctaagcaatcaccattcttcacctggattcttctcatcgcagcttgaagctcttctatacccgtttcccatgaatgcagccccgtcctcactaaaacagacacaagatggtttttttcaatcccaacaacagaacccgtttcgcctactgccatacttgcgataatggcatctgaccccagcccgagtgtgcaatctaaaaacgtatccccttcagataatccggcagcccgaagcataggctcttgctctccctgtaagaagcgtttggctctaaacatcgctgtattcggatgaaaaaagaatttggcaccttgtttcgtatacagctcaaaccgctctttgccgaccacaagcaaatcacgttcagctgacctcagcaggtgttcaaccgtttgtttattccggccgcagtatggcatatttagctctttagaaagctgctttgcggtttttatggtgtgttcagacggtctatagcttgttgttatcatcttctatactcccaaaaagaaaatgcccggaaaacgggcatttagcagtgcgcatcgaaggcagcagtcagatttttcatgatttcttccatatcgtgtccttcaatttcatgacgcggaataaaatgtacgacttctttgcctttcaaaagagccattgatggtgaagaaggctcctggccagtaaaatactcacgcattttcgcagtagcttctttatcttggcccgcaaaaacagtcaccgtattgtcaggtgttttgtcattctggaggactgcctgtgtagccgcaggacgcgcaaggcctgccgcgcagccgcatacagagttaacgactacaagagttgtgccctctgccttttccataaagttttctacttcttctgctgttgttaactcttcaaaacctgctccagtcagctcgcggcgcatcggtaagacaagctggcgcatgtattcttcataagccattgacataaaaaaagccccctctagtatccttcatctgaagtaaaggatactatagagagggccggatttcaaatgttcacgccttaaaatatagaagtaagtgtccccagctgtctagattttcataataccgccggtgttggcacttgtcacaagtttagaataacgtgccaggtagccggttttcactttcggttcaaaacctttccagttcgcttttcgtttttcccactcttcttctggcacttgtacatccaagatacgtttttcaatatcaacgataatatggtctccgttttcaacaaaggcaagtggcccgccctcagcggcctcaggtgatacgtggccgattgagaggccacgggaggctccggaaaaacgtccgtccgtaatcaatgccacttttggtccgagtcccattccaacgatttgggatgttggcgccagcatttccggcatgccaggtccgccttttggcccttcgtatctgataatgacaacgtcgccttcttttacttttcggttgataatgccgtcaagcgcctcgtcctgagaatcgaatacgacagccggcccttcgtgtcttgtaatcccattctgtacgccgcctgttttaatgatagcgccgtccggagctagattaccgaataaaacagcaaggcctcccttttcagtgaatggttgatccagcgggtgaatgacgtcataatcctttacttcatgtccggcaatggtttctccaagagtttttcctgtaacagtcagcgcgtctaaatgaagcgctccttctttcttggaaagctcattcagagccgctgacacgccgcccgcttcatgaagatcttcaataaacacatccgatgcaggcgccagcttggccaagtgcggcacgcgctcagcgacttcgttaatgcgttctaaagagtattcaacgccggcttcgtttgcaagggcaagggtatgaagaacggtatttgtagaacctccgagcgccatatcgagtgcaaacgcgttatcaatcgcttttactgtaacgatatcacgcggtttgatatctttgcgaatcgtttccattaattgcgcagccgattttcttacaaactctttgcgttccggagatgtcgccagaatggttccattacccggcaaagcaagaccaagtgcttctgacagacagttcattgagttcgccgtaaacatgcctgagcaagatccgcacgttgggcatccgaactgctctagttcttgaagctcgttttcgttgattttccctgcttggtaggcgcctaccccttcgaatactgaggaaagggagatttttcgcccgtcacttgttcttcctgccgccatcggtccaccgctgacaaaaatcgtcggaatgttgatgcgcattgccgccataagcattcccggtgtgattttgtcgcagttcggaatacagaccattccgtcaaaccagtgtgcggatacaaccgtttccacagagtctgcgataatttcacggcttggcagcgaatatctcataccgatatgccccattgcgatgccatcatctaccccaatggtattaaattcaaacggcacgccccctgcttctctgattgcttcttttacgattttcccaaactcctgcaagtgaacatgaccgggaacgatatcaatgtatgaattacacaccgcaataaacggcttgccgaaatcctcttcttttactcctgctgcacgaagcaaactgcggtgcggagctctatcgattccttgtgtgatcatattactgcgtaattctgccatggtgatcctcctaaattctttcaattgtttgattggattttattttgaaaattttcagtttatttatgagctgtttttgcaaataagataaattcaggccgccctcaccttgttttgttctttcgtgtttttatatttatatagcttttctttcgatttgaaccctccaactattaatattgttacttactataaatagttttcggatatttttcaacaatattcgaaataatttttataaaaagtgaattcacataaaaaaggtgcatgatctgcaccttttttatttctattcgcctttttttctgctttccgtcatttgtttccaaacagaaccttttgcttcttctccatgctcaatacgttcaagcgccattttgacttgaaggctgacctcaaattcggggtcatcttcggcagcgcgcaaagcttcaattgcactatcatccccgacttcgtacaggaacatggccgcacgccagcgaacaagcttgctggagtcgcttaacgacttgatcatagcgggaatggcttgaggatcgccgatatcagacaggcagtctccggccgttcttctgactgatacagctttgtcctcaagtgctttatacaatagaggcagaacatcaggtgtttcaatcattcctaagtacacaacagcctgtcttctgatggacacctttggatcatccaatgccttctgtaaaaccgggatatcctcttctttcggatccatctgttccaagtgtgcataacgctttttccagtcctcatcatccagcatgtcaagcgttactttatacgctttgcgctgtacagcttgttttgcttcgccctttccttgagcggctgcttcagtcagtcgtttcagccgttcatcactgtatgccgcctgaagctcttctgtcacgtcatggccgatttcattaaagtcaccgaacctgacaccttgttctttccaagcccgctcaaacacaacatttgaagcttcagatctaagttttaagatcgcctgctgaaagcgttcaggtaagccgaagcgttcttcccgctccccatcggttaatttaacttgcataggaatgccgctgaacatctgcacaaaaacttttacctctccaaaagattcttgatcagaacgattttcttctgcgctttcagcactttccatcccaaatgcagtgcggacttgcggtaaaatgtctttccagtcgtatcttgcattccgttcaacagcaagaaaatctgcgacgtgatatacccctttaactccatctattttaaggatttccgctataacaggcggtgcgccttctgcttgctcaggtttatagttattgcttttgcccgccggaagctcttccgttaagatgactttcattgtattcgggcttggtgtaggttcaattgattttatcttcatgatcgtcctcctatagcatatctgtgacttattctatcatagtcgctccaagccttctattacgacgttttggcatcaatcccggatatttctttttctaattggcggacaaactgaagcataaaattgtgtctttcttctgccagttcccgtgcagtgtctgtattcatcatatctttcagccgcagcagcttatgaaaaaaatgagcgtaggcgctttgatcatctccataaaggctatgcccgtttgcgcccgcaaacatgaaagctctcgcaatgccgacagcaccaatcgcatcaagtctgtcagcatcctgtacggcttttccctcaattgagagcggctccttcgccagcttttccctgtctcgaaaggacatccttgttataatatgaatcaccctgtcagcattctcttttcctactccgaaaaaaacgagctggtcatatacttcgttcacagaaagcctgaccgtgtcaggcagcttcacatcaattaaatcatgaaccaaagccgcggtttcaacaatgaacaaatccgctttttccttttctccaatatacgctgcaagatctgctactcttgatacatgatgccagtcatgtccagagctttcgtcagtcaggatagattgaacccatgtcctgatttgctctgcctgcttcaattccttcacaaaaacaccctctttattgctctaatagcttcacgatagcgtcttccagctctttcggatttgtatttggtgaataacggccaacgatttctccatttctatccactataaatttcgtgaaattccacttgatcgccttagttcccagcatccctttcgcatgttctgtcaaatacacaaacagcgggtgggcatttttcccgtttacatccacttttgaaaacataggaaatgtaacaccgtaatttgtttcacaaaattcctgtatgtcagcctcttcaccaggctcttggttcatgaattgattgcaggggaaccctaagatctccagcccctcctgctgatatgtatcatataattcctgcagctgctttaattggggagtaaaaccgcacttacttgctgtattcacgatcatcagtacctttcccgcgaaaggctgaagtgtcatgtctttccctgttattgtacgtacctttatttgataaatagacatgtaagtccctcctatgtccttggtgctgattattttaccttttttaaatcgcaattcaaaatgtaaacatcatttaagaactcataagtaatttgacgatatgagcgtccgttcattatcaattcatatggctcattttttatcttatcattctataaaacattacaattccctctgacatcatggaaaatcattttactgtgaaaccaaaaggcgtgtcagtgcgttttatttaaagagttttctgttgtttcccctcaacacgcatagatagattgaaaattggcgtgaaaattcctataatgaagaaaattaaacggggaaataatggaggtggcacgttgcctattaatataccaacacacctgccggcaaaacaggtgcttgaaagtgaacatatatttgtaatggatgaaagcagagcatttcatcaggatatccggccgcaaaaaattattatattaaatttgatgccgaaaaaaatccaaacagagactcagcttctcagattgcttggaaattcgcctttacaggttcatttcacatttttaatcccaagcacacacacgccgaaaaatactgcgagagaacaccttgacgaattttacacgactttttccaatatccgtcacaagaggtttgacggcatgattatcaccggtgcgccgatcgagcatttggcgtttgaagaggtttcatattgggaagagctcaaggaaatcatggagtggagcaaaacaaatgtcacttcaaccttgcatatttgctggggtgctcaagcaggtttgtactaccattacggtgttgaaaaaattcaaatgccgaaaaaaatcttcggtgtgttcgaacataccgttctttcaaaacacgaaagattggtaagaggttttgacgagctatactacgtgccgcattcccggcatacagatataaatatggaacagcttcaagcagtgcccgatttaaacattcttaccgcatcaaaggaagccggggtttgcttaattgtgtcaaaagacgaaaaacaagtctttttgacagggcaccctgaatatgatacaaatacgcttcttcaagagtatgaaagagatttggaacgaaacctttctactgtcgaggagcctaaacattattttgcaaaaggcagcaacgagccagtgaatcgctggaaagcgcatgccacattattgtttatgaattggctgaattattacgtttaccaagaaactccttatgaatgggactaatttttctttttttagtgatacgctgagcaaaaaatatgataaaatacatctgattcagtctgcgtataacaaaaatttaaaatactggaatccaaatcatttaaaattagcttaactttttcactgcattaataattcgattatgtatttgtgttatgtttatgtatagacaataactccttacgatgcatgaagcttgcttgttgttgattacattgaggtgaatttacttgaataccaataaaagagtattaattttgactgcaaattacggaaatggacatgtgcaggtagccaaaacactttatgaacaatgtgtacggctcggctttcagcatgtaacagtttctaatttgtaccaagagtcaaatccgattgtttcagaggtaactcaatacctttatttaaaaagcttctcaatcgggaaacagttttatcgtttgttttattacggagttgacaaaatctataataaacgtaaattcaatatttactttaaaatgggtaataaaagattgggcgaacttgtcgatgaacatcagcccgatattattattaatacatttccgatgatcgtcgtgccggaatacagacgccgaactggaagagtcattcctaccttcaacgttatgactgatttttgtcttcataaaatttgggttcacgaaaacgtggataaatattatgtggcaacagattacgtgaaggaaaaactgctggagatcggcactcatccaagcaatgtaaaaatcacaggaattccaatcaggccgcaatttgaagaatccatgccggttggcccgatatataaaaagtacaatctttcaccaaacaaaaaagtgcttctgatcatggcaggtgctcacggtgtattaaagaacgtaaaagagctgtgcgaaaaccttgtcaaggatgaccaagtgcaagtggttgtcgtgtgcgggaaaaatacggctttaaaagaatctttgagtgcgcttgaggcggaaaatggtgacaaattaaaagttctgggctatgtggagcgcattgatgagctatttcggatcacagattgcatgattaccaagcccggcggcattactttgacagaagccacagccattggagtgcctgtcattctgtacaaacccgtgcctggccaggaaaaagaaaatgcaaacttctttgaagaccgcggagctgccatcgttgtgaaccgtcatgaagagattctcgaatcagtcacttcccttcttgcagatgaagataccttgcatcgcatgaagaaaaacattaaggaccttcatttagcaaactcctctgaagtgattttagaggatatcctgaaggaatcagaaatgatgactgccaaacaaaaagccaaagtgctatcgtaatggcgtacttgagagcatacgaaaatcgtgtgctctttttatttatattcagccatcaataaaagcggttacatttttttatggaacttgcccttcttttgaaaaataagccgtttcgcaacttgacgggtgctcccagatggtgtatagttgaaccatcatttaacaatgaatcaaagttaaatgatgacaaaattttttttagcacatgggtgctacagtactaggaggaattaagcaatatgcaaaacggtaaagtaaaatggttcaacaacgaaaaaggattcggcttcattgaagttgaaggcggagacgatgtatttgttcacttcacagctatcgaaggagaaggatacaaatcattagaagaaggacaagaagtttcttttgaaattgtcgaaggtaatcgtggacctcaagcttctaatgttgtaaaactctaaactcaatacatgatgatgagatgacaaatagaggagaggcattcgcctctcctatttgattttcatctggatttcaatcgccaaaatgttttgtttgcacctctgttcaatctcttcaacatacttttccattgacggttttccttttttcgcgatatccgccagttcttctaaatcactgtatatttctataaatgttttgtgaaggatcaacttcaagtctttatcatccatagctgcgttccccttctctatcaagatacctcaaatagtaaaacagtcctatttattctggttcaatagttatatcggcttatttttattttcttttctattttggtacataaatttcaaaaaaactctgcaaaataatggcggaggtgtttttggtgacttcagaatttcataaagaggatcagactggctttacggataagcggcagctggaactagcggtggaaacagcgcagaaaacaacaggagctgcgacgagaggccaaagcaaaacattagttgactctgcataccaagccattgaggatgctagagaactgtcacaatctgaagagctggcagctctcgatgatcctgaatttgtaaagcagcaacagcagctgctagatgacagcgagcatcagctggatgaattcaaagaataaaaaccgcagcttctgcggtttttatttttagtgattggttaagacatctccgtattgtttcagcttttcaccaaccgtacatttattgatacaaaatgaatgcgcataagttttgccaaattctttgcgaaactgcttcttaataaaacagtccttgcaatattcatcgtgcagttctgtcagttctttaaagatcattttcttatccaatatcgtcatctccgttacggtctaatttcgtgtggctttctacgaattgatgggatagaatttttttagcgaggccgtcagcttcctgattgtcttttcgttgtattgtttcgtaggttggagtaagcttcagcgattcaaggagtgcttctattttgtcgagccattcattatgagatggatcataacaaggccagctgccgtcaagctgattcagcacaacaagcgagtcccctttgattgtaattgaatttctgcttgccccaagctctcttacttctcttattgcttcataaagcgctgcgtattcagcttcattattggttttcagccggaagcttttattttttctcaaacgatgccggattcctcccaatgaataatagatgacgatcccgagaccggccagttcgctctccttatcgaaactgccgtcaaaataaacagtaatgtcatcaggctcttgagcaagctcctctgtcagcttttccaattccttcagcgtccagctgccgcctttctcgtcttcgaactctagctctttcatgtatggaaaacggccaagttctctggcgagcatacgtgcctgctgtgctgtcagccagtcttcgctaaaaaatgagacggatcccgttccttttgcttctattttcaaatgcggtctgagcttcattacaatcaccttaccattcattagttgccgggcttatgctataatcaaaccaatcttaccccggaaaggaagctttttcatcttgtttaataattcgttttggatcttttttgcgatcattcattttatcattgttcttttattttataaaggatttggcaaaatgggactgtttgtttggatcggttttgcgacagtctgcgccaacctccaagtcgtcaaaacagttgaactgtttggcttaacagcgacactcgggaatgtgatgtatggcacaatcttttttgcgacagatgtgctgaatgaaaaatacggaccagctgaagccagaaaagcggtatggctcggattctcaacgctcctgacgctgacatttgtcatgcagggtgtgctgcttttcgaaccggcttccagcgacatatcacaaacagcgctggaaacgatcttcggattccttccgcgagttgcgttaggaagtctgcttgcctttatcttcagccaaacgctggatgtttatgtatattcggcaattagaaggatatttccttctgatcggcttttatggctcagaaacggcggcagtacagcagtcagccagctgtttgatacattcatattcactgcagtcgcctttctcggcatttatccggcaggcgtgtggcttcatatttttatttctacatatttgattaagtttgcggtatctttgatttcattgccttatgcttatgcagccaaaaaaatgatacctaaagatgaaaggagttcataatgcctacagaaatatacgtagacggcgcaagcgctggtaatcccgggccttcgggtattggcatttttatcaaacatgagggaacagcagaatccttctctattccaatcggagtgcatacaaatcaggaagcggaatttcttgcattaattgaagggatgaagctatgtgcaacgcgcgggtatcaatcggtttcctttcgaaccgattcagatattgtggaacgcgccactgagcttgaaatggttaaaaataaaacgtttcaaccgttcgtagaagaaatcacccgattaaaagcggcattccctctttttttcatcaaatggataccgggcaagcaaaaccaaaaagccgatcttctggcaaaagaagcgattcggctgaatgaaaagaattaaatcttgatcattggttcatcctaatggcgaggtgaactaacatgaaaaagaaagataaaggccggctgaccggcggtgttactccgcaaggcgacctggaaggcaatacacataatgaccctaaaacagagcttgaggagagagcaaaaaaaagcaatacaaaacgctagagaggatctaaacgatctctctagcgttcagcttttcaagcatacgctcaattcctttgatttggtggcggcgaagcatgtcagccgcctgctccatttgcaaagtaaataaagcgtctttcagtgtgcaggccagcggcactgagcaatgaatttccgcaagcttcctcgacatctccaaatcgcttaaaccttgctgaatttttccctgctgtccttttggaagaagagaaagattttccaataaacggtcaatcgtttcgtattcacgaatcagtttgtaggctgttttttctccaatccctttgactccgggatagttatcactggaatctcccataagcgctttaatatcaatcaaagccttcggcattacgcctgtttcttcataaaaagtctcttttgtatagactttataatttccgattcctttttgaagcaaagcaacgcttactttatccgttaacagctgaagtaaatctctgtcccctgttacgaccgtaatgtccgcttcattcgcaaataaatcggcaagagtaccgatacagtcatccgcttcatagccggcaaagccaatattcatgattccaagctctgcggctgcttcctttgccaaatcaaactgcggaatcagctccacaggcggcgcgctgcggttggccttataatcttggaacaagtcatttcggtacgttttgctccccatgtcccagcagcagacgacgtgtgtcggctggaatgtttccacagctgtaatcaaatgctttaaaaagccgttgacgccgttcgtcggcaccccgctgtcatttatcataaagttgcgatgtacggctgtggcaaaaaaggcccggaataaaagagccatgccgtcaaccagcaatagtttattattattcatcaaataactcccttttctttcattccttctattttatcataaagcagcccaaaaataaaaaacagtatctctttaattagagatactgtttggatatttatcaatcgttgtgtcttttgttgctggcgatcagcttttcagcttcgcgtcctgcgtaagagtcaaaatgggtttgaaatccgtttttctttttggcattgttattcgcctgtgcatttctgtttccgagctttgttctgcccaacatgaatccccccttacgtcggatgcatatagtatatgcttccggcaggaggttcactcgcgacaggatcatccagcttacatgcggcttacgtattctctgaccatttcttttgatacaagccgtcttgtcgggacgatgccttttttagcgagctgattcatttgctcggtaatttcattaattgcatctgtagtataaggctcatcgtttctgcatttagcaacagcttcttcaatcgccaattcacgcatattttcaagacgcataaatgctttgatatgctcgtgctgttttgatgaatgtgctgaaattgctttatgtacctctgacattaatcgttcatctcgcttttttctatttagtctatcatgacttgaaatacaagccaactgaattttacatttttattgtattgtctgaatttttccaggagatgcacgcctggtacgctatttcaatctctttcgcatgttccccttccgcatatcctcttaaatatgtctctttttgatccgttatttgcgcgattgctttttcacccatatcttcctgtaagcgtctgaggtgagctgtgtaatgagagatcaggctttcttcttcattttttatccatgcctctgtgattttcgtaagtttcatccgtacagcttcgataaaggccgattttcctttctgctcaaaaaactgcttcggtgatttgacctcttttagttcctgctcaaaagcacgttcttctatttccggttcaacttccttcaactgtatgccgttcgaatgctgatcacccgcataaacggaaaaataaccgtcctcgtttaatgttttttgaaattgatccagccattcttcattgatatgccgttcgatgaaaccgctcatgcgaacatcaagcgttttgatttcctgaatatattcaaattgatattcatgtaaggctgttgtcatcgccttactgacgttctttttccaatccccgttttgcagcccgggatgaaatgccgattttaataaatcatttgcaaaatatgataatcgctgtgtaatgtgatatagctgctctcttgtatctttttttactttttcaatgatggtttctgagttccgccgtttctcgatatcggccgctgtccgctcaaatgacagcataaggcgctgtttctgcgcttccttctcttctcgggactgatgctgggattggtgaagctgaaaaacagtttcgcatagtttgtctgcctccgaactgagctgcgctgctgacgctttttttacatccacttcgataaaccggtctaagtgttttcttactttcgggaactgattataaaatgactccggttttcccaccagttcctccttacttgatacggtaaagagctgcggctcataaaccccttcttttacaagctctgcgctgacataatcggtcactgtttcgagttctgttttatcttttgcaaggtctgcagcattaataataaaaaacattttatccatgctgagcgattctttcacaagtccaagctttcgcaaaaatgaacggtctccttttgaaaaagagtgctgataataagtcatataaaaaaatgcatcggcatctttgatatattggaatgccagttctgtatgccgtttattcatgctgctcgcgccgggtgtatcaacgatcgtaatccctttttcagtgagcgggcatgtataatagaccgttacctcttttacagcacaggccgttgtttcctctgctacatacggctttaattcagatagcggaatcgttaatttcttctgttcctgtatatactgctgatacttctcgtatgcaagcaggaaattgctgatcaatttcacgtgttcttcctgcagcctgttttttttgactgccttttcccacttctctgtgaaggaacggcctgccggttcctttggtattccggtgagctgcaaaatttcagccgttatgtcatcctctgtcttaaacactacatccgctgttttgtttaagttgccattgattggcattgtgatcttgttaattgtcgctgtggttggcgttggtgaggatggcagcactctttcgccgacaagcgcattggcaaatgatgatttccccgagctgaagcctccaaaaagagcgagtgtaaatttccgttcctcaagccttttcaccctttcacgaaacgctgaagtttgctttaacaacatgctgcattcgcttaaaaggtcagacaaagtgtaaaagcgtttgatttggtcttgaagcggcatttcttgttccattttgatttctgatttcggcatcggctgcgccgtcagctggcttcggccttgtttctgctctggagccgccactcttgttttcttcgatttaaaccattctgtgtctatatgcatggggcatgcggactcttcttcccaaatggcccacaggcgatcggttttctctcgggcattattctctaaacgcgcctgttcttgaagaaagacaagtttttctgattcttggacgagcctgtctttaattgtttgcacatctttggaaacacgctctttcaccatagcggagagcacctttatgatgtctgcggcttctcttttcgcctctttccggatgagctctgccaagtcttttgtatattgcaatacatattcagaggaaaaggctgcaccatgcttgaccgcgcgttcaatgatgcttatatcaagcggtgtgcgataggcctgaatcagcttttcactttcagcggtatagacatcaaataccttggcgagtttatgaagcgtgtctatcatatgccaatccgcttcgggctctgttcgttttgccacatcagagaaaaaagcattccgccttttatctctttcctgtgcagttttcgctttagaaaagaaaaagccggttttaaaggaaggctcttgtgattctaaaaatgcagccgccaattcacgcatttcaaaaggcgtcaggtttgcgttttttaaaatacgattgatttcttcctgcatcctcgtctctgcctcagtcgtttgtttttcggcctcattcaattgatcacgcagcgattggaccagtccaatttggatattaagctgttcagcgaaactcggagcgcctgtttcgtctttcttcagcatttccgtatgttcctttagcagattacggactttttgttcggttaaagcctgcatattgctttttgattgctgttctattcttcttaactcttctctcaggacccccatctgattgaacgggtggtccggttctgttactgacgtaaaatagagcgcttcctttgaaatcccttcattgcaaagcatctcctctacctgcgctttatagtctccaaatttcgtctccgtctcatcatggcggtcaatttgattgacgataaaatacacattcggaatgctttcttttattgatctgagaaactttacattttcctcagcgtgcacgtgattatagtgaacgacgtaaaacagcgcatccgcttggtgaagaatagaagcagccgatagaaaatgagcatcatctgttgaatctatccctggagtatcaatatacgcaaccccggaatcgatctcagtatacctgtcaaaaatttcgacgctttcaatctgttccccgtctttacaatattgctgcaccttgtctttctggtaagccccttccagctcagcacacgctccgtctgttgtatgaagccgaactcgcttttccccgtttctgatcacaacaaggttagcgcttgtcggaatcgggcttgtcggcaaaatattctccattaacaggcagttcagcagtgacgattttcccgctgaataatgcccggtaaacgcgatataaacctcttcatcagccgcttttttcatgaccgcagccagtttagcagccctttgttcatcttgattctcaataaattgcttataaatttccccagttttatgcaaaagctcttttctgttttgatctgtcataagtctgaacccctttgtgccgtttcaattgtgaacctttttcgaaagatctgaattcattcccttttcattttacacaagaataaaccaaatttctttaggagaatagaaaaaagccgccattacggcagcttctataaaagaaaatctgcaacttttacaagttccagattcatcaaacagatttattagagattccttttaatacaaaaccaattaatacactatatgtacaaaccgctccaagcaaaaacagcattgtcatttgcttcaccatcctgattgagaatctttttcaaattcattttaacatagttgagaatgattttcaatcgctattttatgctgtattcctgtaatgctttgtcttctgcgcgaattctgacgcttaacaacacggcattgaaaatggaaaacagacacatggtgacgtatgcttgataaagcagcggaatcagcaaaatttcgagtataacaacggcatagtttggatgtttcatccatttatatggacctttttttacaagctctacacctggaacaacaaggattttcgtattccaatatgcccctaaggaacaaagcgcccaataccgtacgatctgtacgcttaaaatcactgcagcgataccgagccaccagctggacggctgtttattcatcagcagcacttcggcaattaaggacaggaaaaaaaggatatgcatcgtaatgatatatggatagtggctctcgccaaattcaattgctccttgcttctttaccttttgttcgttttgcctggccactgccatttctgctgctctttgaacaatgagaatggcgatcatcaaccaaaacatgagtcaagcccccttttcccagctgaataatagcaactctgatgagaagcccggccctaatgcgccaatcagtcctcgttcatcttcctttttatgtccgttctgcagatggtctttgatcacatacaagattgtggctgaagacatatttccgtgcttttgcaaaatgctttgcgcagatgaaagcttttctgacgacagcccgagacttttgatgtatgcatcgatcactttttttccgcctggatgcgccaaaaaaacactgatatcatggaatgacagcttatgtttgtccaaaaaaatctgtacatttgttttgagccatttttccaccaaggtcggaatgtctcgtgagaaaatgactttgaatccttgatcggtaaagtcccagcccatgacatcttctgattgtttcatcaaaacagattgggcgtccattatcttcggcgcaagcttcagctttgacatcctgcggtccgccttctctccgcataataaagctgcggcaatgccgtcaccaaaaagcgaggtgccgatcagattgcttttcgttttatcttccggctggaatgtcaggctgcacagctcggcagcaatgacaagcacaaaagcctcaggatacgctttgcagtattcggctgcacgcgcaagtccgctggctcctcctgcacagccaagcccccaaatcggaatccgcttcgtatatggagaaaacggaagttcattcataagccgcgcctcgatactcggtgtggaaagacctgtactggagacgaaaaaaacagcttccactttctcataaggaatggcttcttgaaaaaattccggatgagagaggcactcacgaacagccgctctgctgtgtttaagtgtttcttctatgtatatttgatttttttcttcaaagctgtgcccctctttataccattcaatcggcttaacaaactgtctcgaatggatttgcccgtttttaaaggaggataacagccggtcaatatccttaaaagaatgctgaaacatatagcgggcgaactcggccgctttctcttggtttacattatacgcaggaagacttgttccaatggataaaataaacgccatgcgatcacctctttgcatacattgtgccgcaacaatcttttttatatgcaaaaaaactccgccgcggcggagttagactgctgttttttgttcagcgaggtcagcttcttgttctatttttttagctttagaaaaaaagttatatacaatatttaagacgactgcagtaaagctgcccgccacaatgccattcgttgtaagcagcgttaaggcactcggaagctgtttgaaaatatccggcacaacggtcacaccgagccccaatcccactgagcaggcaacaatcagcagattttcctgtttcgcaaaatcaatgcggctgagcattttaatcccgtaagcgatcaccattccaaacatcgccaccattgcaccgcccaaaacagcggatggaataatggtcgtaaaagcagcgatctttggaaacagcccaaatgccattaggatcacacctgtgaccacaatgacggcattttttttgatccctgtgagctgaacaagcccgacattttgagagaatgccgtataaggaaaagcgttaaaaataccgcccagaagcacagccagtccttcagctcgatagcctttagacaaatctttctctgtcaaacggcggtttgtcaggtcacctaaagcaaagtaaacaccagttgactccacaaggctgacaattgcaacgatggacatcgtaatgataggcgctgcatgaaaagacggcgcgccgaagtaaaatggctgaatcatttgaacaactgccgcgtccgaaacattatcaaattgaacttttcccataaaatatgcgatgaaggtaccaatcaaaataccgatcaaaatcgagacggacttgataaagccttttgtaaaacggtatagaagcacaatgatactcaacacggtaaaagcaagcgcaaggttggagagatctccgaaatctgcacttccttctccgccggccatgttattcatggcaaccggcatcagtgtaataccgataatcgtaacaacagagcctgtcacgaccggcggaaaaaacgatacgagctttccaaagaaaaatgaaataagaatgacaagaatgcctgaagcgataatgctgccgtaaactgttgaaaccccatattcagatccaatcgctatcatcggcgatacagctgtaaaggtacagccaagcactaccggaagcccgatcccaaaaaatcggttgctccacacttgcagaagtgtagccacaccgcacataaaaatatcaattgatactaaataagtcagctgctcgacggtcagtcccattgcttttccgacaatcagaggaacaacaatggcgccggcatacatggcaagaacatgctgaatccctaaagacagcgttttgccgaatccacttctcatgaatgaacctcctgtacgaaggacacttttccttcttctaaagactgaattcttgccaaagattccactcgatagcccagtttcacaagttcatctcttcccggctgaaatgacttttcaataacaatgccaattcccgcaatagaagctcccgcttgcttcacaatcgacacaagcccgtgcgctgcctgtccatttgccaaaaaatcatcgataatcagcacatgatcctgatccgacagatgggtcccagacactgcgatttggctttctgtttgcttcgtaaaggaataaacagacgctgtcagcaagttgtcggtgagtgttaacgattgatgctttctcgcgaagacaactggcacacccagcttcaagcccgtcattacagcgggagcgatacctgatgattcgattgtcacaattttggtaataccgtcttttgcaaacctggacgcaaattcgtcaccaattctctgcataagcagcggatcaatttggtgattcaaaaaagaatccactttcaatacctgatcagataatacgatgccttcttcctctattttccgtttcagtgcttccatcctgtctacctccgttatgagaataaaaaaagcattgcccgctcaaataaagagcaagcaatgctgatatcacaaaaaaccgtacacgtgcggttccattgctcacccatagtcggacatttacggtgcccggtagaaacttgcgtgccatatccacgcgaatatatgagtgttcctattatattgtaataaattatatcaagattctaatctcttgcataggctgaaaataaaaattcccgaactttaattttgtttttttagatatcattcgtatttcaaggggattcgatataaaagagcctgacgacgcgccgccaggcttttgattatgacagatagagatttgaatatttgtttgataaataatcaattaaatagcgaacattcagctcttctcctgttgcatctttaataatgtctaacggctttttccgttttccgtgaatgtgcaccttttccgtcagccattgctttatcggatggaactctcctctttccaagagagcgtcaaattcagggagatcctcaagcattttttgtttcagctgagccgcatacatgtagccgagcgcataggatgggaagtagccgaaatctccacctgcccaatggacgtcctgtaaaatcccctctgcgtcggtctgcggtgtaatccctaaataatcctggtatttttgattccaaagcgacggcagatcttccacagacacttcattgctaaaaatcgctttttcaatttcataacggatgatgatatgaagaggatacgttaattcatccgcttcgaccctgataaatgaaggttttgattcattgattgcccggacaaaatcatccagggagatgtccttgaactgttcaggtgatgcttcttgaatcttctgatagtacggtgtccaaaaatgcttgttgcggccgataaaattctcgtaaaataatgattgcgattcatgaattcccattgatgcgccgtctgacaagttcgtgccactgagtgcttcatcaatattttgctcgtatatcgcgtgcccgcactcatgaatggtgccaaagatcgccgtccggaaatctttttcatcatatctcgtcgtgacccgaacgtctccccggttcagcgtagttgcaaacggatgaacggtttcatcaagtcttccgccatcaaaatcgtagccaagctcctgtaaaaaatacagactgagctctttttgcttttctttcgggaacgcttttgtaagaaagcttgtatctggtttatttccggaagctgtcacctgtttaacaagagggataatcgcttccttcagctcagcaaacagctgatcaagcacctttaccgtgacgccgggctcaaacaaatcaagcaatgcatcataaggatgctcttgatatccccaatacgtaataaaacgtttattgaattcaatcagctgttctaaataaggagaaaacaagctgaaatcagattttcctttcgcttcctcccacgctgtttctgcctttgaacacagaattacgtattctttgtattcagcctcagggattttcttattctcttcatactcttttttcgccagttccactgcttttttcgtatcttccgacaagtcatcaaatcgttcatacaggacatcgataagctccttcattcgatctgatgtttggatattgaatatatctgttgaaagctggccgatgctttcggcacgatcctctgagccgtttttcggcgcgcctgttctggagtcccagtgcattaacgcaactgcttcgctgtaatgtgagattctttttaaaagatcaaaaaattctttttcatatgtatgtatctccatatccattccctccctattctagccgttccattacaggctaatggaagggggtatgaaagtcaaattgtttgtataaaaggctgccggtatgttttgcggcagcctttttattcagttgatcgtcatttgattttttggcggaggtgttcttcgctttttctgcttgatttttttatccacccacactgttgccagcggggttaagagcgaggtgacaataacgcttgtcgctataattgcagttgccgactcagcaactggcgcaaatgaggcattcgcttccgctaatgcgtatggcacggctacagccgcccctgccgtagaagaagcggccacacccgcgacaccgtctccccgcgcgacaaaacgatcaagtaaaaacaaggaactgcccgataaaatgacgacagaaactccgataaaaatgccgagcagccctgattggatcagcattccaaaattcaaggtattgccgagcgaaaaggcgaaaaatggaatgatcgccggcacaaccttgctgaataagtctctgagatcgtgatccagatttccaagtatacatccaagtaaaaacgggataactgtcgctgccagcgtttcccatgggaatgcggcaagtcccgtcacaccaaacgtcaccatggtcataaaaggaccagattctgtactgataaaggcgaaagcgcccgcatcctcttttcttcccatgtgattcatgagcgccaaatacagtccgccgttcgtttcattcattaccgcgacaattgctaaaacagaaaggcctgcaaaaaagccggattgtatgccttcgtcaggtataaattgcgctgcgatcacgccgagcagtgccgcaaatccgacctttcccaataataacgtgattccttttcttgcgatatagcctgaagaacgaaaatcaatcgttgctcctacgcaaaagataaaaacacccagtattggcagcgttccggtaatcaaagcacccgtaaaccctccaaagaactccgctgttccaggcgcaaacgtgttgagcgccgctccaagaaatagcggaataatcatcattcccccaggtacccgttcaattgtcgccttgattttcatattgtggattctcccatcctccggttatgaaaaaacaatttcacttacacttggaaaacagcctgcaaatcctcttttgaacagctgcccagctggctgccgactccgacggcgccagctccggctctaagccaatccggcacttcagacggatgtatcccgcctgtcggaataaaggtcacctgcgggaaaggacccgctaaatttttcataaacgggatgccaaacacaccgcttgggaacagctttaatgtcgtaaaaccgaatgtcagcgcttccataatttcgctcggagtcaagacgccggggatataatgtgtctttacaaaagatagatgttcagcaagatcagctgaaaaacccggactgacaataaactgcgcgccagcctcagcagcttccccagcttgctgcgcggtgatgaccgtgcccgcgccaattaaaatatcttccctattacggaaggattcgataatatctgatgccccgggggtcgtatacgtcacttcaactgcacgaatccctttatctaacaaactctcaatctgctgacaggcctcctgcgtatcctttgaacgaatgactgcaatcagctttgcttctttcagacggttttcaacgactttggactccatattaataatcccctttcttttggtgaaccgttctttgagcagataaaaaagaagctaatttctccctggtcggcaaaccgtccatatcccccggtgcctgcacttgcaaagcgccaatcgcatttcccctttgcaccgcatccttgtacgacaaaccgtctaggataccgctgattacaccgactgcaaatccgtctccggcgccgaccgtatcaaccacccggtcgacccggcagccttctagaaatccttcacttgtccccgttttaaagtaagcgccttcttttccaagtttaatagcaacaaagctggcaccttttttcaaataatagtcggcaatgccttcaggtgttttttctccggtcaatagctctccctctgcgatacccgggaaaaaccagtctgcaagcccagccagatcattgattgtgtgtaccattgttgcttgatcaggccaaagcgaaggtcttacattagggtcgaatgaaatggtcttccctgcgtttctcatgtcgttcatgacatgatacgtgaagtctttcatctcggctgacaaggcaggcggaatgcctgtcacatgcaaatggcctgcgcattgaaaataatctctcggatattcagctgaagttaatgtgcttgcagctgagtttttcctatagtaggtaacttgcgggtcgccttctttcacttttgacttcagcagcagcccggtgggattttcgtcctgcgagcggatcacgcgggacacatccactccctcttttttaagttcctgtacaataaacgttccgagctgatcattgccgaccttgctcatccatcccattcgaaacccgagtctggcaaggccgcaggcgacattgctttctgctccggcaagccctttagaaaaagtggatacttcatgaaggcctccatactcatttgcataaaacatggccattgattccccgaatgtcaccgcatcaagcttcatctcttcccaacctcctcttagttgagggcacctaggattaaagtgactttctcatgatgacttttgcctctaattcaatggtttgaggcgctcctttgtcaccttcaatcctttttaatacacgttccatcgccgtcctgcccatatcatgtgacggctgggcgatcgttgtaatacctggaccgatcagtttataccattccgtatcatcgaatcctgcaatccctatatcttgagggatgcgcaggccaagctcttccatacagctgatgattttcagcataatcaagccattcaaagccagaatcgcttttttttgctccggcatttccttgtgaaaagaacgaagcgccgccttaagctgctccttgtcctttacgtcaatttcaagcaatctgacaagcccgttcacattatgaaccgaagccattttctgatacacagctgctctttctgcacgagggctgatagaggaaatcggttcggtaaacagcgcgacatcagtataccctttgctgtacaccttctgaagaatctcttttgtgatccatctgttgtcagtcgttacggtatccagtttcagatccggcagtttccggtcaattaagattgttggaatttgctgttcagcaaaagcgcgcagtacatccttgttttcccctgttgcgtttaaaatcaagccctcaaccgaatgggcttctagctttaagagcatttcccgctctttttcaggactgttatctgtgttgcacaccataatgctgtatccatattgatcacaaacctcttcgactcccctgaaagcagcgaccgaaaaaggatttgtaatgtcagctacaacaaatccgattaacttgcttttttttattttcaaaccttgcgccattttactcggccgataattcaattctgcaattgcctttttaatgtttttcactttttcaggagaaatcgcgtcaatttttccgttaatatagcgggaaactgtcgatttcgaaactcctgcacattcagctacatctttgatggttgtatggcctgttgttttctttttcattcaagtgctcctgtatctcttatatttgaaaccgatttcaaaaccgttacaacaaaagaataccataattttaaaatttgggaagagtttttttaataatgtgtcaattcattattttttcgttgactcttttcactatttatcctaaaattttctttgaaaccgttaccaaaatattttcattcaagtgatgctgaaatcctaaccaagggggaaatataatggaaaatcgttattctgtacatcctgaacaagtaaaacgctttacaacagaggagcttcgcagtcatttcttaatggatcctttatttacagaaaacaaacttacgatgtattactcacatgaagaccgggttgtcatcggcggagcggctccagggcaaagtgaactgaagcttgatgcaggtgattttctaaaaacagacttctttttggaacggcgtgaaatcgggattattaatgtcggccagcctggtgccgttagagtcggcgatgatgaatatgtgcttcaaacaaaggattttctctatatcggaatggataatcaggatgtatcattttcaagcctgaacggggaaaaagcgaagttttacttcgtctccgcttgcgcccacaaaagctatccgacacaaaaagccgccctagctgaactgacaccggaccgccttggtgatgatgcagcgtctaatgtcagaagtctgtacaaagtcattcatcaggatggcattaaaagctgtcagctgatgatgggaataacgatgttagatcaaaacaacaactggaataccatgccagcacacgttcatgaccgtcggatggaggcttatctttatctggatcttgaaaaggactcaaaggtatttcatttcatgggccagccggacgaaacacgccatcttgttgttggaaatgagcaggctgtcctttctcccgcctggtctattcattctggcgcaggaacatcaaactatagctttgtgtgggcgatggctggagaaaattacacatttacggacatggatctcgttccgatggatgggctgaaataagatgggttatctacatgacgccttttcattagaaggaaaaacagcgctggtgacaggccctggaacagggatcggtcaaggaattgccaaagccctagccggtgctggcgctgatattatcggcacatcacataaaagcagcctgtctgaaacacagcagcttgtggaacaggaaggccggatatttacatcttttacattggacatgagcaagccggaagcgataaaggattctgcagctgagctgtttgaaaacaggcagatcgacatccttgtcaataatgccggcattattcatcgggaaaaagcggcagattttccagaagagaactggcagcacgtactgaatgtcaatctacacagcctgtttattctgacacagcttgctggcaggcacatgctgaaaagaggtcatggaaagattattaatattgcctctctcctgtcttttcaaggcggcatcctcgttccggcttacaccgcgagcaaacacgctgttgccggtttgacaaaatcatttgcaaatgagtgggcagcgtcaggtattcaggtcaacgcaatcgccccaggctatatttctactgcgaatacaaagcctattcgggatgacgaaaagcgaaatgaggacattttaaagagaattcctgccggccgctggggccaagcggatgatatcggggggactgcagtctttttggcatcacgtgcttcagattatgtaaatggacatattttagcagttgatggcggctggctatcccgctgacaaataaaaaaagctgacgaacgatcgtcagcttttttccattacatcatgtgcggttcaacaggcaagacctttttgacctcatcaatgatgcgttcattttctccgccagcgtaaatgtgaattgagccgctgtcttgattcgaacgaatcaggcgcccgatgccctgccgtacacgtaacaacatatatggcagatcaacttcttcgaacggatcttttttcgctccgttgcgcttcgctgtaaatacaggatcgtgtggcggaaatggcaatgaccaaatggtaacattcttcaatgcgtcaccgggaatgtcgagtccttcccataagtgaactgaacaaagtactgtttcctcttcctcttggaatttctctactaagctgctgatttcctcatcaccttcgaagaaaattggatacggcagctcccatgccgccgacagctctttaaactcgtttaattcttcaaaagaagggaaaagcaccagcgttcttcctttgtaacgtttgattgtttcaatcgtttcagccgttttttgttcagcggccatatctgtttttgcgtatagattaatactcatttgctcgtcataatcataaggggaatcaacagttaatgacaaataatcatgaatcccaagactgtcggcaatataatcaaacgaaccgccttctgacagcgtagcagaagagaagatataaggaattttcttagaaaacactttttcgccaagtacttctgctaccgttctcggcatcacgacaaaggttgattctgcttcctttttctccagccagctgatcgcatccttttgatatagagataatgaatacgccatttgttcaacatattcttccactactgacagttcgtattgatcaatcgtatacatttcagactcaaatacaagtgcctcaccgattttatcaagtaaacggcaaagctcgtccgccgcctttttgacacgatggtcattttttatttctaaacggtgtgaaccggctacttcctttgattcttcagaaagaacatagaaaaattcgtcgtttgcgagaagcgcatcttcaatcaattctgcaaactcttctctgatgtcattttgcagcaatcgttctaaaaacaattcaagagtagactgcttcactctataggttagcgctttttgcgcagcaaactctaacaagtgcccctcatcaaatacaactgcactatgatcaggcaagagcggcagctggccctctcgtttgcgtgattcttccgtccacacatgctccatataaaaatcatgggaacatatgattaagtccgttgacttgcgatagtaatctctggaaagtgtcagaccgcatctgtgtctcatatcacaagtcagacagtcctgaaacgagtcgtagcttacgtcagaccactcttcattcgatagatttgcgtactgcttacggtcgccatacggataaaagcgctgcatcgcctgtgactcgtggacaaatgacggtaacgactcataaagatccagccatttatcatcatcagaacgctgcattgttttttcaagcttcttcaagcataaatattgctcatgcgattttgacagccttgtatcaattttcagatcaagatgctcagccagcttagaaatatcgccctcttttttcactagctgttcaattaatgtttcatctgcacaagcgatgatggcgggtttgccgacataccttgcatagctgattgcaaaaagaagatataccagcgttttccccgttcccactccagcttcggcgaacatgacttttttctctttaaacgcccgctccagctgaaaagccataaatacttgctcgtcccgaagatcaaaccctttttcgggaaggatatcgtaaaacacgtcaccaatccaattgttcaattcttcataaaaattctttgttttcgttaaagaaaaaggcaaacgtgatgttgtcacctagttccaacccccaactattcgacattcagaccaccaataatatcattttccgctgatgaatacaataaaaaaacttggcaatgccaagttttttgcagtttacttacgattgatcacatgcgacgataaaaaaggatggtctgttgaataaatatgttctaccgctttttctaaattagtttgcgcatgcgaaatcatagacggagacgattcagtcccgagctccttcagctcgtttgctgttgcgtcaagcgccctttgaataagattaaaatgttcgctgttcagcatgagatcacctctgatggaaataatcatcattgtatgcgaacttttcattttatatacatgctttaccgcatgttatcaccgaaacatgcacaaactacacttgatattccgtctccggattatccgtcttatcaacaatattctatcagggagtgatgttgacatgagttatagaaaccgattagatcagcattctgaactgttccatcacaattggacgcggcctaaacgttctaagtctcaagtaaacggtcacactgaaatgtcccaaaccaacattatattgagaagcaacgcgaaagctcaccgttggtaacgatagaatagggctgaaagatgaaagaagacgcatgcagagcgtcttctttttatgcgttttctgttttcttgcgctgcggccttacttttgaccaatattgataataatccgttttaataaacccgttaaagagctttcgtttcttcgttgcttttctgccatatgcttcctcaaagttttcatttgatgtcagcatatacacagaccaagtatcaagcggctcgaacgccttccccatttctttgtacatctgctcaacggcttttttctcgccgagacgctctccatatggcgggttgccgacaattacgccaaattccagatttgtggtaaagtctttgacctgcatctgtttgaactggattagatctcccaatcctgcttcctctgcattttcttttgcgatttgaaccatgcggtggtctatgtcgctagcgaaaattgtaagcggctgatcataatttgccttttcttcgacttcaagccgcgctttgttccacagatctttaccgatccattcccaatcctctgaaacaaaatcgcgattgaatcccggggcgatgttttggccgattagcgccgcttctatcgcgattgttccggagccacagaaaggatcaacaaacgggcggtccggcgtccaattggttaattgcaccaaagcggcagcaagtgtttctttaatcggcgcaccgccctgatcgacacggtatcctcgtttgtgaaggcctgtccctgatgagtccagtgtaatcaaagcctgatctttcaataaagaaatttcgactttatactcggcacctgtttcttcaatccaatcattggctttgccggactgcagcttgagcttttcgacaattgcttttttgacgatccgctgacagtcgggaacgcttgcaagtgttgattttaccgattttccgataacagggaatttcccgttttcaggtataaatgagcgccagttaatcgctttcgttttttcaaacagttcatcaaatgttttcgctttaaaagaagcaacctgaacctttatacggtcggctgttctaagccaaaggttggcacggcagatggcaagtgcatcaccttcaaaaataactttcccgttatcaaccgtgcattcgtatcctaaatctcgtacttcctttgcgacaacagcttcaatgcccatcggcgccgttgcaattagtgtatacttcttcatcgtatcaccctgtcttttgaaacttttctcttttcaagataaaagctctccttatacgggagagcttgttttcatcattttaaatgtaagtggtctaacgttctgtaagccatgttttgttccgtcgtactgcaaacggctcatcacctcgtactcaggcggcaatcatctatctacagaaagcattctgtccttctctccgttgaattccgttaagaaggttcccctaccaaaatttgggtttctcgctcgaggggtttaccgcgttccactctcaccatttctagtgagacttcgtcactgtggcactttcaaggatactcagccatatccgaagacgtaggcttttttcctgccgtcagtctctaaagactgccctagcttatgacttcgctaggcacgaacactacgggcatctcagcaccgtgcgagcatggactttcctctacagattcaagatctgcagcgattacccgaacgttaagaacatgaattattatataacaactgtttacaatttacaagcgccatttttttcaagcgtgatcaatcataaagcttgctgccaaaaacgtgtttttctaagttagacagccgttttaaaatatcaaagtttgttgtgttagattgcacaggctgttttttgctggcttcttcaagctgttttttcagctgcagattttcctgctgcagttcttcaatttcttgatggaaggtttcataatccttaataatcatatctaaaaatttgtcaacgtcttcttgcttgtagcctctaacgcctgttttaaattctttttccaaaatttctttcgcagaaagctttactttatcagcaagcatctttttcacctcgtatcgtgaatcatcacatatattttttcagaaatctgtacggttgtcaaatttctctctcattgttagtagctgtcttcctccactgtcactctcaagtcatccattgtaataaagtagatgggatagccatcctgttcgcgccttttttccgctgtcccaagcatatacttaggggagccttccttttccgggtcatataaaagcagaagcccgtcggacttatcaatgaagaactgatttttttgtttgaattgaagcgggctttcataaggacggtgagtcaggcttgcttcatagtctgcctgagacagaactgcttcatactgttccttattcggttctttccagttcttttcctgctcgtaaaatggtgtgatgacagctacttttaagtcagggtattcctcctgcaaatcatatgcagcttctgccgcccacagctccgctccaagctggcccgaaattaaaatccattctaatccttcatccaaaaaagcaatcagccgattcttaatggctttttttatgtaatacagcgccttgtcatcctgcttaaatatcccgagttcaaacggtttatagcccgtaattgccagtactttcatcatttcacctgctttaaaaaatggggctcccgtgggccccatttgttgtgctgcattgtttacaccatcaagctgcacgttttccatactagtagtcgcagcaaggttttcctgcttgaaaatgctgatgcgtagccgggtcaacatttgagaaagtgtgtggaaagtagtgaacgtgctgaaaatgctggtggtttacgtttgttgtatgctgtgggtgaatgtgcggcacgatagtcttcgaaaacgtatggtgttcacagcaatgagtaggatggacaattggcgccatcatatgcggtctgcagtgatgcatgataaaatcccctttccataaactttattacaatactaagctatgaaaaataaggggtacatgttctgatgcaaagacctattttaaaagtgtgcaattaagctgtctttaaagtttgaaaacacaaaagcaatcaaaaataccacaacaaagaacaagtaaaaaacacccttatacataccaactctccctttaaaaataactaacgtcattttacaggattcgccgctattctacaacaaaatcaatgtgaattcagcaaaaaaaattcatggcgaaacaagtcgtcttttgcgctttcccggggaatatttaagaggaatatttcctcttcagccgggcaattctcacatgcagtttttcagtttctttctctgataagcatgccgcatcgctaagcaattgctctgctatttgcaatgcttttccggattcttttttcttatgctcaaaatatttcgcgagctctattacagcagcgtatctgcacttctggttttgcgagcgggacagcttttcccaaagcggcactgcttcttccaagcggttttgttttttgtacaggagcgataaatccagccgtgcactgtcctggtcctcaaacgatttttctataagcctttccaactgcttgatcgcttggtccgtttctttatgagccataaaccatttcgccatagcataggcttcactgtgttcttttggcgcatgtgattctgaaaggatttttttagacatatggatgtacaatgaaatgagtgataacacatccatttcattatgatgcaggacaccttttaaaagatccggctcttgcgccttgataaaatgaaagtaaagcattggcgccaagtagcccggtgtgtcttctagcctgcggatgccgagctcctctttttcaaccgtgccaagagatacacggtccattttgtgtttccacaggcgtctagctccatgcaaaagatcaaagtggccaaactccggaagcttcggaagtctgtcacggatcaaggtgtgccttgttttcacctgcggccaatcaaaggctttgccgttgtaggtcacaagtgatgtaatgtcaacctcgcttaaaaagctttggtacaaggcgacttcgttccccggtttgggcaaaagatgctgtttgactgtcactcggtcttcatatactctcgcatgcccaagcaaaaaaatggtattcccagctccacccccaagaccggttgtttctgtatcaaagaaaaagaggttgtttttgttatacccttttgctgacaatgtatgcgacaggccgctttgattccacagtgtgatcacttcttcaagctcagaaaagctgtataacccatggcggtgagaaagcggatattctacttctctgatgaggcaatattcatcttcgaagatgaaaggcttcatgccaaaagcctcccactcttctaaaaacgggatgtcatcaaagtggttttcttgtttgcctgcttctattttttgttctccttcgtcgagcgccatgtgctttttcatccgttggagtttcccttttaatgacatatccggcctccctccttacgacatttgatccaacagctgcaaaattctttcctttgcttttatcccttctatttccgtacctatacaagacggacagccgtcatgacaaggacaatgtgtaatcagttgtttcgccgcttcattaatgtctgaaaaacgtttaaagacttcctccgccaaaccgataccgcccggataatgatcatataaaaatatggttggcaatccggtatgggctgctttgatttgagaaacaacatgaacatcatttcgatcacacatgatatacacagggacaatatgctgcagcacattcgagatgccaagaagcagctgttccagtgtcttttccccgatgtcttcatccgctgttttgatttcgagccaagctgcacttgtatgcagttcttcttccggcaaatgaataggtccagacccaatattttcaaaagtggtcatttttatttttttaaaaatggtcggcagggcattgacagtgacgtctccgtagtgcaatgacgtacggcttttttctttcgttttatcgatttctaaaaccttcagctgaactgccaggtttgcatccgtataatattcgacatcgacttttctgacatacgcctttttatggtcccaatcgagcttctcaacttgatactgaacgccttcatgcaaataaatcgcttcatcatgcaaaagcgtcatcgcactaaaacggtccatttcaccgataatccttacatttgcaatatccgactgatcaactataacgacattttcctgggaggcggaacgcaaactgatgtttgaagcagggaacgactcacttgcccaatggtaccgttcgccgttgcggtgaagaacagcctcttcctcaagatactcaagaatatcactgacttccatgggtccaaattcttcatcagctctaaaaggaagctcataagccgcacactttaagtggtctactaaaataatcaaattctccggattgattcttgcagattcaggcgaacgattaaagaaatattcaggatgccgcacaatatattggtcaatcggtgttgaattggctaccatgataatcaaagattcaccgtgtcttctgccggctcgtcccgcctgctgccaagcacttgcaacacttccgggataccccgtcattacacacacttgcagctggccgatatcaacaccaagctctaaggcattcgtactgaccactcctaaaatgtcgccttctctcaggcctttttcgatttctcttcgctctttcggcagatagcctccccgatagcctctgattgattttgttccaatctcttttttcacaagctcctgaatatggcttaaaataatttccacccgaactctgcttctggcaaaaacaatggtctgcactttgtttttaaggaactctttcgccagttcattcacttctacggttgcgctccttctaatattcagcggtttgttcacaattggcggattgtaaaacacaaaatgcttgcgtccgctcggtgcgccgttgtcatcgaccagccgcatcggtttgcctgtcagctgctctcccaattcctttgggttggcaattgttgcggaagtacaaataaaaaccggatcacttccataaaaccggcagatccgctttagccgccggatcacatttgccacatggctgccgaacacacctcgatacgtatgaagctcatcgatgacgatatacttaaggttttcaaacaaactgacccatttcgtatgatgcggtagaatggcagaatgcagcatatcggggtttgtaatgacaatatgacctgcttttctcaccttttgtctgattgccggagacgtatccccgtcatatgtaaagcttttaatatcaatgcccatttcatcaataatttcatttagctcgctcttttggtcttgtgccagcgctttagtcggaaataaatataacgcccggtttgtttcatcttgggcgatggactgcaggactgggaggttgtagcataacgtttttcctgatgctgttggcgttacggtaacgatgctctctcctttttgcacatattgaaaagcggaatattggtgagtatatagttcatcaatgccccttttcgaaagggccgctttgattctctcgtctatactttcgggcataggccttgtttttgcttcccgaggctcaatttcatgccaattcacaacgttttcatttccttttaaatcagaaatgagttcagtcagtgatttctttttcattctttacacctctttgtcaagtacagtttaccgaatatttgtttgcatggctaggtgcaaattttatacagttgaataaaaaaagcaaggcatacgccctgcttatttcgctttgattgtaaggagctttgattcgcctttacgagcagccttttcgcctgccggcaccattgatcctacagcctcaccattcattataacgattgggatgactgtgctgctcgctttttcttttattaattccaaatcacatgtaatcagcgggtcaccgaccttcactttatccccttctttaatgtgggcagtaaatccttctccgttcatattgactgtctccagcccgacatgaattaacagctcaattcccgagcgagtccgaatgccaacggcgtgtttggtgtggaaaatctgaatgacttcaccttcagcgggagaaacgatttcaccgctagaaggttccacggctattccttctcccatcattttctgtgaaaaaacagggtccggcacatctgacaggtccattactgtaccgtctgccggagaataaataacctcttctgtcaccttttcctgagttttgcccattccgaataattttttcagcaatgtattttctcccttctcattcttcaaccgttatcccttcattcaccactatttaaccacactttcaattttgcttcaatttataacaacatctggcatagacgcataatctggttaaaaaaggcggtggcgaaattggaattctatgatgacaaaaagaacgaactgcaaaagaaagaagaaatcataacggaggcaatcgacactctttttcaatcctcagcgttcggcaaccttataaacggatttcagaacctaatcaactcgagtttaaaggatgtgcagacgaccatacatgtcagagaaagagatactgggctgtatatcgatattaccattccggcgacgtttcgagatggcgagatcgtcgttgatgttaaatcgaggtatctccatgtaacactccaagaaaaacagaaacaccaaaatgaggctacctttacaagcatgacaagaacggttcagctgccttatgaagttcgccaagaagatatggaaacgtcttggaacgagcagacaatgacacttttctttccaaaaaataagcatgaatgaacgattcattcatgcttctatcatttaaaaaagctggtaaatccctttattaaagatccgacctgattcattgcactcattacttgacctgtcgtatccatcattttattaaaatcaaattgcccatttgcttttttgaactgcgacataatgctttgaaattgcgaaggctgctgttgattaggccttgggataggataagggttagaaaatacaggcggctgcataggcataggctggatcggagcataaggctgataataatcctgctgtccataatgctgctgaggcagttgttgctctaaataaccgggtgcagcctgctgataatatccttgcatatgctgaggataataatagcccatttgccgaggatagcttcgagagctcccgttcattgcgattcccccctaaacacaacatatttctcttctatatatgtatgaatgacttctattgtttgtgtcacaagtgatgattagcatttgtcaaattgtgtcgaaagtttaaattttttaaaaacagaaaaaagtcgaatcattatggtaccatattttcaatacagatgagaggggatgcaccataatgaacgtatcatacttaagcaaacgttttgcagaaatgaagaaatatgaaacagactgtatgaataaactgatggactttgccaagttcctctatattcaaggacatctcagcataactgagtttcgtaacagtatgaaggttctcgaagcaaatggagcagaaagcccggcatatgagatgaattaacgtccggccccctataaaaacgaaaagaagacagccttttaccggctgtcttctcttgcaatttcatcctttactgcgtgcaatgtataaaggactgactcagtgatgtccttgaatcgttttttatgaatatgatgaacatatgattgaaggaccaattccaggaaattatcttttacggtctcaatttgctctttatgcacatattttggccggtgggcttttatcaattcaagagcaccctctgcccagcgggccgccagttcatcattctcttcaactgcaggctttatcatctcaaaaaaatcataagaatgattactgttttttccttcctgataccgatcagcgcctttttcagcaacttcaatcatttgctcggtcatttccagcaaagtttgtgatagcaatatctttcacctcaatgcctatcgtaccaaatttcactcgcaaattcagccgatgcggtataccttctcaaacgcatacctgtgttcaggcgattgatacagctcatttatacaaatatgaagatctatgatttcttcttccagcacactcaggcgatcattttccgtttcccgcatctcagcctctaatgcatttacagaatgattcaggctttgctcagctcgcgttaattcatcttctatatcagaaagcatacggagaatatctgtcttgcatacataaccggacattcgtgtacctccctttccttgtctctcccgcttaacattctttgctctcaaggctctttccttcctcatgacaaaactagaagcaaatcgccaaacaaacaggtattccacgaaaagctgaagttttcgacaaaaacacccgcaaaaattgtatgatcctcctccttaatgcaaacgatacttgtgaggaggtgccgtatgaaaacaagaccgaaaaaagccggccagcaaaaaaagactgaatcaaaggcaatcgattctttagataaaaaattaggcggcccgaaccgcccttctacgtaagaagcaaggaatttccttgcttctttattttttcagccactgctccaccgcaaaaagcgcatgaagctggcgctttttatgtaaataccagtctgtcaattcaatctgcttcggcaattcctcgcgcctaaagaacgttttctttatctttccatgaaaccaatctgttttcgttccgtctaatgagtggattaactcagggtagcatgtccttagcataggagatgttctttttgtaatcccgatcatcttttccatatcaaaacgggaacctgtgtgcggcactgtgtgcaaaaagtgataaaaagaggagaacaattctggcttgaacagcaattgagacagctgctttcccagccttatcctttcctccgcctttgaaaagcgtttcactgaaatgccgtaaaaaaacccatttgaggaaggaaaaataacggtgttaaaatgaaaccagtcacttaaataaaaaggaatcgtgtcaaaaacattctttttaaacgaaggattttgtataataggtgtttggatagtgttttgttcatttataatgagggcatacattagccgctccgtatttcgctcatgccaaaaacgggtccattcttccgacataaattgtgagacgccaaacacatgcagaagatgaaacagcggtttcccgactctttttgaccagtggtataaaagaagctgcggataggcatccgaaaaaataagccagttcgctctttcataggctaaaaagaaccatttttgctgtctctcacggagtccaagctgaaacagactgccttttaaatcagtcattgaccagcctgcattacgagaaacgaaagaagccaaaagcgaccatttgatttccggatgacggtcgtaaaatgctttataagcatttgttcttgaaatgttatccgcgttttttatttttgtctgccgctcaatccggctcagaagctttctgatgatctgttgttcttgcacgttcattcacttccgtcatgattagtttaataaggaggatgagaaagtgattcggtatcctaacggaaaaacatttcagccgaaacattcggtttcatcccaaaacagtcagaaaagggccccgtcttacagtaatcgcggaatgaccctcgaagatgacttaaacgaaacgaataagtattatctgacaaaccaaattgccgttatacacaaaaagccgacacctgttcaaattgtaaatgtccattatccaaaaagaagtgccgcagtgattaaagaagcttactttaaacaatcatcgacaacagactacaatgggatttacaaagggcggtatattgattttgaggcgaaagaaacgaaaaacaagacctctttccccctgcagaattttcatgaccatcaaatcgagcatatgaagcaggtaaaggctcaagacggtatttgttttgttattatatccgctttcgaccaggtttattttttggaagccgataagctgttttatttctgggacagaaaagaaaaaaacggcagaaaatcaattcgaaaagatgagttggaagaaacagcttatccgatttctcttggatacgcacccagaattgattatattagtattattgaacagctttatttttcgccatcatctggtgcgaaaggttgattaacgaaaggttgagatgttatgtcagatcaatttaacagccgtgaagctcgacgaaaagcgaacagcaaatcgagtccttcaccgaaaaaaggcaagaaacgaaaaaagggcggattgtttaaaaagacccttttcactttactcattctgtttgttttaggcgtagttggcggtgctgttatatttgccgtcatggtttctgatgcgccgtcccttgatgaaagcaaattgaagacgccttattcatcaacgatttatgataaaaatggaaaagagatcgccgaagtcggcgccgaaaaacggacctacgtctcgatagatgaaattcccgatgttgtaaaagaagcctttatcgcgacagaagacgctcgtttttatgagcaccacgggattgaccctgtccgtatcggcggtgcattagttgccaactttaaagacggcttcggggctgaaggcggaagtacgatcacccagcaggtcgtcaaaaactcccttctttcacatcagaagacgttgaaacggaaggtgcaggaagtatggctttcgattcagctggagcgcaattactctaaagatgaaattttagaaatgtatttaaaccggatttatttttctcctagagcatacggaatcggaaaagcggcggaagaatttttcggcgttacagatttaagcaaattgactgtcgaacaggctgcgacgcttgcaggaatgccgcaaagcccaacagcgtacaacccggtcaaaaacccggataaagcggaaaaacgacgcaacatcgtactcagtctgatgaaaaaacaaggatttatttctgattctcaatataacaaagcgaaaaaagtggcagtgaaagacgaaggcgtcgtgtcacagaaggaatatgaaaaagcaagtacaaacaaatacagcgcatttgttgaagaggttatgaaggaaattgatgaaaaatctgatgtcgatccatctgctgacggattaaagatctatacgacattagatacaaaagcacaagataaactagatgaattaatggacggagacaccgtcggatttactgaaggcatgcagggcggcgttacccttctcgatacgaaaaccggagaagtgcgggcgattggcgccggaagagattctacggttggtggctataattacgcgacccaagctaagcgacagcctggatctaccattaaacctattctcgactacggtccagttattgaaaataaaaaatggtcaacttacgagcaaattgatgactcagcttacacgtattcagatggaacacctattcgagactttgaccgttcctataaaggggtcatgtctatgcgtgaagccctcgcccaatcacgtaacattccggctctaaaagcattccaagcagtcggaaaagatgcagcagttgattttgctaatggactggggctcggattaaataaagaaaaagtgtatgaatcatattctatcggaggattcggagaaggtaatcccggtgtctctactctaactatggctggagcatacagtgcattcggaaataacggaacatataacgaaccgcattttgtgaaatcaatagaatttaatgacggcacgaagcttgacttaacacccaaatcaaaatcagcaatgagcgattatacagccttcatgattacagatatgctgaaaacagctgttaaaacaggtactggacagcttgcacaagttccgggagtggaagttgcaggtaaaacaggtacaacaaactttgatgaagcggatatgcaaaaatacaatatcgcacaaggcggtgtaccagattcttggtttgtaggatatacacctcaatataccgctgctgtttggacaggtgtagattctcaaaataagataggaaaaaaatctttaaataaaacagagcaacagattgcaaagcgcatcttcgcccagctcatcgccgatgtcgatgacggaagcggatcatttgagaaacctgacagcgtagtggaagcctctgtagaaaaaggctcaaaccctgcaaaactggcagggccaaatacgccaagcgataagaagctcacagagtactttgttaaaggcacagctccttctactgtttctaaaacatatgagaaagaagaaaaagaggaaacagctaaactgtctggtttaaacgtgaaatacgataaagacaatcaatctttaacgttaagctggaattacgacggagatgcgacctttgctgttaagcaatctgttgatggcggcagctactcagaaattcaaaacagctctgcaaaagaggcagtcatatcgggtgtgcagccaggatctgtgtacaaattcgaagtaacagccgtcagtgatgatggcaaaagtacagcttccacatcctatgaggtgccaaaagctgaagacgatgaagataaaaaagaccagcaacaaacggatgatgaaaaacaagatgatgagaagactcaggatgatacacaaactgatgattctcaaaaagatgacggtcagacggatcaagatcagacagatgattcaacaaacgatcaagacaaaaaacaagacaatacgaacaccaatccgtccgacaacaataaccaagaccaatcaaacgataacgataacgacaacagtaacaaccaggatacgtcggatggtgattcgaactctggtaagaatgattcaacaggttctgacacgaataaaaataaaacagacacatctaataaaacacaaacaaactcatcatccattgaaaaaacaaattaaacaaaaaagccgtcacctttggggtgatggcttttttggtacacaataaaaaacctcccgttttaacaggaggttttatcgattcatcgcatgatatttgtaaaaatgctttttcatttcggtaaacagctcatcaagctgaataaagcaatggtattgggtcggcttaagaagaataaattccactcgttcagcccaattaatcggctttgcgggatatgatttctccctcaattcttgccaatcgagcgatttcaccggctcacctgctgtccaatgtaacgaagccagcaaacacacaatgccctttaacatttcgttttggtcacatctcgattttcgtgtttgaaagactgggagaagtgatgctttgatgtcatcccacacttcaaataaaagcggaacgtatttcccgctgtcttcccatggcaaatcgccttgtaattccgtgcagaaatcaaaatacacgggattggtctgcaaggttttcttcatatccgaggaactcttctggccaagactgcgcaagtattgctcataagaagccaacacttcttttgcttgcgtcatcgtttcaccagtccttttttatccctcttctgcccttctctgcacaaagaaagcagcggacactccgcacagcgcggagattgggctttacagtgatatctgccgaagaaaataagccggtgatgcgtaacggaccagtcttctttgggaaccttgcgcatcagcgtcttttcaacttccagaaccgagtccttccaccggcaaatgcccaatcgtttgctgactctctccacatgggtatctacggcaatggccggcacaccaaacgcaacggataccactacgtttgcggtctttctcccgacccctggcagtttgacaagctcatcgcggtctctcggcacttctccgccgtaatcttcaataatcattttactcagcttttgaatatttttcgctttattacgatataaaccgattgatttaatatcctgctgaagctcttccagcggaacagccaaatagtcttccggccgtttatatttttggaataatgttttggtcactctgtttacaagtgcatctgtacattgcgcagataaagctacagccaccactaattcaaaaggattggaatgaaccagttcacactccgcatgaggaaacatgtcacctatcttgtctaaacagaattcaatttgttttagatttaacacgattgtcaccttttcactttattgttcaagccaattgtaaaaaggaacctgccttttatactctttttgcggttcattctgctttgcttgtacacgccggaatttttggctgtgtatttttgcctgctccacagttttaagcccgtttttcttccattcaaacaaaatccggtcaatgtagcggaaactgagttttcctgatagtacagcctcttttaacgcgtgtttgatcagttgtgcgtcatgctggtcctggtcctgccagatcgccagcgtttcacactccaaaggcgataacggccttgcgaactcttcctcaaaaatggtataaaggcttttttgttccccttctgcttttctttcctgtgtttgattctgtgcaagctgaatatactcgtacagcttgccccataaaggctgaagagaatatttctcaaatttgatgccgttttgatcctcgcattcttcaataaacagaaagcctttttgaataaacatccgcaatctgtttgtgcattcttcaacagaaattgacataccttcctgcagctgattcggtgtaggaaaatatgatcctttttctaaatgcattttaatttttaacagcagaataagttctgtttcattaagcccaagctgtttataatgcgtgagcagaagattggggatggttgatgttccctgctcctgcatatcaataaattgctgttttttcatcgtcacacctcttactgtaaaggattgtgattacccctttactgtaaaaagtctcccttgcaggagactcttttttgtttcatttgaatgtattacggatacagacggtttaacagtcttgggaacggaatcgtttcacgaacgtgaggcgctccgctgatccaagctactgtccgctctaatccaaggccgaagccggaatgaggaactgatccatattttctaagttcagcataccatttatatgcgtcagaatccagtccatgttctttaagacgcgattccaaaagttccatatcgtgaatccgttcagacccgccgatgatttctccatagccttccggcgcaatcaagtcagcgcaaagcacaacgtcctcacggtcagaagccggctgcatatagaacggttttaaggacgtcggatagcgagtgatgaataccggtttgtcataatgttcagcaatcgctgtttcatgaggcgctccgaaatcatctccccactcgatatcgtcaaagcctttttctttcagaaattcaatcgcttcatcatacgtaattcttgggaacggggctttgatttgctcaagttttgacgtgtctcttcccaatgtgtttaattcaattttacaattcttaagaactgattgcacgatgaaagaaacgtaattttcctgtacttgaaggttttcttcaaattctacaaacgccatttccggttcgatcatccagaattcgattaagtgacgctttgttttagacttttccgctctgaatgtcggtccgaaagagaatacttttcctaaagccattgccgcagcttccatgtagagctggccgctttgagacagatacgcatcttcatcaaagtactttgtcgcaaagagttctgttgtaccttcaggtgcgcttccagtcaaaatcggcggatccacttttacgaagccttcgttattaaagaattcgtaagtcgcgcgaatgatttcattacggattttcatgatcgcatgctggcgctttgaacgcagccataaatgtctgtgatccatcaaaaattccgttccgtgttcttttggtgtaattggataatcggtcgcttcgtgaatgacttcaatatctgtcacagcaagttcatatccaagcggagaacgctcgtcctctttgacaatcccttttatatagagcgacgtttcctgcgtcactgatttagctgtttggaaaatgctttcttccacttccgcttttactacgacaccctgaataaaaccggtaccgtcccgaagctgtaaaaacgcaattttcccgcttgaacgcttattagcgacccaagctccgatcgttacttcctcacctacgtgcttgtacacttggttgattgttgttttcaacatatttccctccaaaacaagaaagacattcggaagctcattgccccgcgaactcttttatcatcactttattatacccgctcttaactaaccgggtcaatgcagataaaaagcggcttttctgtcagccgctttttgatctgttagctatgtttttctacaaaacgcttgattctttcaatggctttttcaagaagatctaacgatgttgcataagaaagacggacattctcaggagagccaaatccggatcctggaacaatcgcaactttttcctcctcgagaagcgctttaacaaattcatctacatctttgaaaccgcaagattgagctgcctcttttgcatttgggaacaagtaaaaagcaccttccggcttcacacagctgaaccctgggatttctatgagctttgcatagatcgtatttaatctatgttcaaatgcttctctcatttcttccaatggctcagaaggcccgttataagcagcaatcgctccgtattgtgcgattgatgtcgggtttgacgtgctgtggcttgcaaggttcgtcatcgctttaataatgtcttcagagcctgccgcataaccgattctccagcctgtcatgctgtgggacttcgatacgccgtttataatgaccgtttgctctttcagtctgtctgacagctgtgcaatggaaacatgtttctttccgccgtatgtaagtttttcataaatttcatctgacacaatcaagatatcatgttcaaggcacacttcaccgagcgcagacagttcttcttccgtatacatgacaccagtcgggttgcttggagagttaataacgattgcttttgttttttccgtaattgcatttttcagctgctcaggcgaaattttgaagtgattttcctcaagcccttctacataaacaggctttccgccagcgagtttcacctgctccggatagcttacccagtaaggcgttggaataataacttcatcttcttcatccaaaatcacttggaaaagggtatacagagcatgtttggcaccagtgcagacaataatttgagacggtttgtattcaatattctggtcgcgtttaaatttctctgcaatgctgtttttcagttcagccaaaccaccggaaggcgtgtatttcgtatggccctcgttcatcgaacgcacagcggcatcaataatatgctgcggtgtattgaagtcaggttcgcctgctcctaagccgatgacatcatggcctgcggctttcagttctttcgctttcgctgtgattgccagtgtggttgatggtgttaatgcggatactcttcttgccagtttcaacttgaactccccctaattcgtcttaaggcgtgatatttttgagaatctttccagttgtaaagtccacataacttaaactgtattgcccttctttgtctaagtacgtcacttcccaaagcaggacgtttccttctcttgccagatgaacctctttttgctttgaaaccagcccttcatcctttatgattttcgccgctttgtcttcagagattccctctttcgcttcttttgagagaatttttgcttttttatcagcaggaacccagacatataatgcagtgccttttttatccgttccctttacaacataatatttttcttttccgacaaatgtttcgacttgatcaacattggcgagatcggtttcttttttagcttcagcagctgctgcttcgtgcccctcttccttttgtgccatggctgatttataaatgcttgccgagacaagaagtactgctaaaaaaataataccaaaaatgacggtaaatattaatgctttttttctcatcttctcacctacgtacgataaatggtaaaaacggcttggtttttgttttcttcatccagtgcaaggccgaacatcagattttctcttttcagtgtacgattcaatgtgtccacaattttatacagatcatcagaatgctctacattaattgttgaaagaatttcgattttactttccattttttcatcctccagtttgaacaaatattgtaagtcatactccatttcaggacacgccatactagtatcacagagcgggaaatccgcttttaaataaaacaccatcctactcccacaccgcaaaagccgctttatgcggcttttattctttttcccctgcaacataagcttcaagctcgctgtcagtcatttcggatactgaggttgtcggcaaggcatcaagaaacagccggccgtaaccagcggttttaatccgtctgtccaatataataatcgttcccttgtctcccgcagaacgcagcaagcgtccgattccttgcctgaaggtcagcacagcttccggtaatgacactgtttgaaacggattctttccttttttgcgggcaagctcacattttgcagcatgaagcgggtgatcaggggaccggaatgggagcctcacgatcattactgtcgtcagctcatcaccagggaaatcaacgccttcccaaaaatgatttgttccgagcaggatcgcctgattggatgttttaaaagtcttcatcagcttgccgggacttccgcctgtaatcccttgtgccaagagctgaatgccggaagcactcatgttatgcttaagctcctggtgaacctttttcagcatatcatgggatgtaaacagcacaagaattttaggctgtttttcctttgccatcagttcgatataacgggctgtatcctgtataaattcaggttgccctgtatcctgaattgatttcatttcctttggaatcatcacctgcatacgctcatcgtaagaaaagggtgactcaattctcattgtccgcgggaaaaagtcactcagtcccagtcgttcaatcataaattgaaaagaaccttcgactgtaagggttgcagatgtcagcaccacactatttttgcgcgcgaaaaactgatcagccagaagttcaccaggttcaagaggctgtgcgtaaatggccactgcatttttcgcaccctttgcatctatttcaatccaaaccgcttcatcatcatcagacccaaagaagagcttctgcaacgtctgacagtaatgctgcaagcctttcatgcttctttggtattcatcggctaaaaagacggttttgctcttcatacccttcaaatgtttttccatcagggatgactgcgcctcaaaaagctgctgcaaatttgtcagcatggaacaaagcctctccgcaccatccgttaagatcgaccagcttttatcctggctttctttgttcaccttaaacactagacggtttaagtcttctttaggttttcttcgtttgacaaaagaatgtacagagctgaagaaagcatcactttctgcttgaacgtgctgaagccactcttccaattcgaaaaatgaatcaaccggcaggctgtttcgctggaatagctgtctcatcttttttagaagtccctgctccttcagagtgccgattctgctcaatttcgtatgcaattctatgtacgtggctcttttccctaaatgttcgcttgccgcacgttcaaaatggtgtgcttcatcaataataaatgtcccgctttcgggaagcctttttttctggctgccttcatcggtcagcaaaagggaatgattggtgattaccaaatcggagcgcatagcaatctgtttggcccgctcgtaaaaaccgatcacatgctcactgcgacttcttttataggagtcatcgtcataagccaatctgtcccacagcaattttccgcctgaaggcaaattcagttccgctacatctcctgtatttgtctctgtcagccaaacaagaagctgtgcctttgtcagtacggcatcataattatcatcttcttcatgaagcacctgctcaaatttatacaggcataaataatgcgattgcccttttaaaatcgccgctgttaccggaaatggaaacagatcttggacaatcggcaaatcctttgtgagaatctgctgctgtaaaagcgtcgaatacgtgctgattatgaccggcttttttgatttcttggcaaaaagcgcagccggaataagatagccaatcgtttttccgatgcctggaggagcttcaatcagcgcatgctcacgattggcaaacgcatcagccacctctctcatcatcatcatttggccgtctcttttttcatacccaggcattaactctgacagcgctttttcatttcccgcttcccagctttcgatctcaaatgagaagttctcgtcctcatttatacgaacatcgatagcttcaggttctctgacagaaaacgaagaaaagcgcgtatagcccggtatctcggtatgtctgttttcattaatgaacatatccaacaaatgcgtcagatcactgatgaaatgctgcgaaagccttcttaactgctttaatgtcggataaggaagctgccgcagcttttcaaggatttccaaaaaaataagccctgtcacttcagcatcgctgtcagcccggtgcggctgatcatgccgcagctgaagctcctcgcttaattccgtcagcttatacccttcaaatcccggaaaaacaatgcgtgagagctcgacagtatcaagcacttcacaatctgggagctgaaagcccgccttatgtagctcatacttgacaaatccaaggtcaaaatggatattgtgggcgacaaaataagcgccgtcaagcaattggaatacttcttcagcaactgcttcaaatggctgttcattttctaccatttgattagagattccagtaagctgctcaataaaagcagggattgatttatttggattaatgtattttgaaaaccgctcagtaatttgtccattttcgattacaaccgctgcgatttgtatgattttatcgcctttcttcggcgaattccctgttgtctctacatctataacaacgaaccgttgcttattcattaaaatggacacctcaattcttgcatacgacaaaagtgtaacacgttttgtacggaaatggagcggcaaaaccgttttactctcaaaatcttaaaagaaaacccccgataaagggggcttttcttctacaaaattgtacgggcgggttcgtttcccagcatttgttcaattttgttttgatcattcagaacagccactttcggctcgtggcttgccgcttcttgatcagacatcattttgtaagaaataataatgaccttatctccttcctgcacaaggcgtgcggctgcaccgtttaagcatatgacaccgcttccccgtttaccaggaataatatacgtttcaagacgtgctccattattattattcacaatttgtactttttcattaggaagcattcccacagcatcaatgagatcttcatcaattgtaatgcttcccacatagttcaggtttgcttccgtaacagttgccctgtgaagtttgccgctcatcattgttcgatacatattatattctctccatttctcgaatatcaataatgatgttatctattaaacgcgcttttgaaaaagcaactgcaacagcgagaatcatctttccagcaatttcattcacaggctcgagttccggataggaataaagctctacatagtctatggttccgctagtcgtttcaatgatttcttttgcagcttttatcaccgcttcaggatctctttcaccggcttggatcagttccgcacttgtttgaagggcccgatacagcttaggcgcttcttttctttcctcagctgttaagtatacattgcgagagcttttggctaagccgtcttcctctctgaccgtatcgacaggaaccaattcaatatccatgaagaagtcactgattaacccatcaacaacagctacctgctgcgcatcttttaaaccgaaataggcacgagtcggcttgactagattgaaaagcttcgtcagtacgatcgcgaccccgtcaaaatgtccttctcttgagcgcccgcataacacgtctgtgcgtctttctacatgaatcgtgacattcttttcaccgggatacatatccttagtatctggcgtaaaaagaatatcaactccggcgttttctgcaagagctgcatcccgctcaatatcgcgcggatatgcttcaaaatcttcattagggccgaattgtgcaggattcacaaaaatactcataataacggcgtcgttttcttgtcttgctttgtctgctaaggttaaatgcccctcatgcagaaaccccatcgtcggaacaaatccgattgacttgccctctgaatggtattgttttatggcttctttcagctgtgtaatatcagtaatctgtctcatcttattttcccccgtacaagccgtcaagcactgtctggttcatttgaaaggaatgcttttgttcagggaaagcacgatgtcttacatcctgaacatatccgctgattgctgtttcgatggtttcatcaatgcgcgtatattgctttacaaatttaggtgttctctcaacaccgtggccgataatatcatgataaacgagaacttgtccgtctgctttcacaccagccccgattccaatgaccggtatgcttagcgtctcggcaattttggctgtgagttctgccggcacacattccagcacaagcatcatagctcctgcttcttcgcattttatactgtcttctattaattttttggcgctttgttcgtctttgccctgtactttatagccgcccagtacgccgactgactgcggtgtcaaacctaagtgactgactactggaatgcctccaagcgttaatgcgcgaatggattcaaacacgccttctccgccctcaagcttcagtgcgtcagctccgctttcctgaacgatagccgctgcatttttcagcgtatcttccttggacaggtgataagacataaacggcatatctgtcacaataaaggtattcggcgcaccccttttaacggcttttgtatgatggatcatgtccgcaactgtcacaccgacagttgaatcaaggccgaggacgaccattccgagtgaatcaccgactaaaatcatgtcaactcccgcttgttcagcaagtttagctgccggataatcataagcggtcagcatgacaatcggttcttcagactccttcatttttagaaaatccagttttgttttcatgttttctcctcctcatgtttagaggagatgatctgccgttttcttctgcaagccaaaaaaccttccgttacaacgagaaggattcttcactttctaaagttcggcgagtttcatccctctgtcccagtccttttttggatcaaggcagactgctgcaatgtctatctattttaacaataggtgcagttcgcaggcgatactgcccaatggaagtataccaaaatcaacgggcttgtaccaacacattagcccaattcgatatcggcagagtagatttttttaatgccttcgttcgtttctaaaagcagaacgccttcatcatctatacctaacgccttaccgtaaaaggttccgtttaacgttctggctctcatattagtgctaataccgagcgcatagctttcccataaaagcttaatcggcgtaaatccgtgcgtcatataatcccggtaccgtttctcaaagcatagtaaaatatgctggatgacgccggcccgatcaattttttccccagcagcttggcagaggcttgtcgcgatgtccttcaattcatctggaaaatcattaggctgctggttaacgttaatgccgatcccaatgatcactgaacgtacgcgatcttcttcagcctgcatttccgttaggatgccaactgttttttttccgttaatcaaaatatcatttggccatttaatatccgtttggatgcctgctgcctcttctattccctgcacaacagctactgcagcaagaagagtcagctgcggtgttttttggagcggaatgtcaggccgcaaaatcaggctcatccaaacgccgtttccttcttgagaatgccataccctagacatccggccccttccggctgtttgtttgtcagccaccacgagggtgccttccggtgcgttattattcgcgagctcatgagccgttttttgcgtgcttgaaagaacgtcatggtaaataagatgctggcccatcacttccgtttttaatccaaaacgaatttcgctttcactgagttttccgggttttttgatgagccgatatccttttcttctaacggcttctacttcataaccctctttccgaagctcttcaatatgcttccacacagcagttcttgaacagccgagagcatcactgattttttggccggaaataaattcattgccggcctgagaaaataattcaataaggtcttttcttaatgttgaccgcatgtcttcagccactcctctatgtgtttcttttgattggagagcttccctgtcacaacagcctgctcgatccgctgtaattcttccgacacccattttccagccggccggtttcgaagcgcaagcaagtccttacccgtgatatcaagatccttaaggcttttgatcggcaggttttgataagcgtactgaatgtccttcagtttcttttcatccagtttttcgttttgccgaagctgcgatactttggccgctgagagcagtgctttttccccagctctgtacattgtcattgcgtcaaggctctggccaaacgtatcggcaatgtgaatggcttccttaatcacttttcccgggagcttccaacctttcaggaaaaggggcgcgtctttcaagactatgccaaggttaattaaaagagcagcccaaagctcctcacgggatgttaaagagaagaatggaaactcactcgttgaaatcaggttttctcgtttatgataaaaaccaggaagctcttcatacaatctcgtttgaatgagtgtttgaagcgcctggcgagaagctcttccctgcagcaatttctcgaactctatagtttttcgttcgactgaaacatgggagaggagtgatttttctttcgcaatggcttcttctgtttccggtgaaagcgtaaagccaagctggctcataaagcgtacggctctcagcatacgaagcgcatcctcttgaaatctatcctcaggctttccaacggttcgaatcactttctgatcaatatctttcttgccgccaaaataatcaagcaccttcccgtccgctgtcatggccatcgcattgatcgttaaatctctgcgttttagatcctcttctaatgatgagataaattgcacttctgacggtcttctgaaatcaacataatcagattcagtccggaatgtcgtgacttcataggtttcatcctcccagagcacaataatggtcccgtgctctttgcctacatcaacagtccgctgaaacagccgttctacttgatcaggtgccgcatctgtcgcgatatcgacatctccgatcgttcgtttcatatagctgtcacgaactgcgcctccgacaaaataagcctgatggcctgcttcgattaagatgcggagcacgggaagtgctttgataaaaactttttccatgtgatcactccggttctgctaaatcggcataaatctgttcatactggctgacaatttttttagaagaaaattcattttcaagcatctctattgccgcctttgtaaaacgattgcttagctgttcatcttctaaaatgctcatcgcgcgggctgttgcggccgtaacatcaccgacatccaccaaaaatccgctcacattgttttttataacctcagggataccgccaatgtttgttccaatacaaggcactccgcaagccatcgcttcaagcaggacaaggccaaagctttctttttcagatagcagcagcttcaaatcgctaatagaataaagctcttcaacacggtcttgatttccaagcattaagacttggtcttccaagccatattttctgataagctcgcaggctgtcgatttctccggaccgtctccgactaaaagcagcttcgctttcgttttgccagcgatattgcggaacacacggatgacatcctgcacgcgtttaacttttctgaagttggacacatggatgacgactttttcatctggtaaaattccatgtttctctttaattgccgctgtgtttttcttcagatacacgcgctcgtctataaagttataaatcgtttcaatttttttctccggtttaattaaatcgtacgtttcagccgcaagcgctgaggagacggccgtcaccctgtctgatgactcaatagcaaaacggatcagatcttttagagacggatcataacctaacaccgtgatatccgtgccatgcaaagtggtaacaatgccgatattgcgtttcagcatttgttttgcaagataggcgcaaacggcatgcgggagagcatagtgagcatggataatgtctaaattctcccgttccgccacctcagcgattttgcttgccaatgtcaaatcatacggaggatacttaaaaacagcatattgattaacctcaacttcatgaaaatgaatattgggatgatatgtattcagtctaaacggaatgcttgatgtgatgaaatggatttcatgtcccttttcagcaagctgcttccccagttctgtcgcaatgatacctgagcctccaacgctcggatagcatgtgattcctatttttagttttctcattgttcgcccccaagcacatcatgatcaagcatcagcatccgtttggaaaagaaaccttcggcatactccacgcccgcttctttaccgtaaagcttttctctcgcttcaacgatttcaatatacccattcgtcagaggagtagaaacggaatcctttgacgggataaactggcttttgtaggcgttgaggctttgtttctttgcctctattgtatccgagatatcaataacaaaatccggctgatgaaaaccatttatcatataatagtaaaccttgctgactttatgcgccggaaggcttttttcgtctttatatttatggattccggcggaaaagatcgcttcttccaccagtgcagccgcattggcgtgatccggatggcgatcctttttatacggcataaaaaccgcttttggccgacagattctgatgacagtgacaattgaccgaattgcctgatcactcattattaggccgcggtctggaagcgttagctgaattcttttatctgcgcctaatatgcgggctgcttcagctgcttcttctttacgcaaactgaccgtaccgttagaagagagttccgcttctgtcaaatcgcatatcattacttttttttcctgtttgacaaacttcgctattgtgccgcccattccgatctcgacatcatcactgtgggcgccaaaagcaagaacgtcagcattatacattcggctcttctccccgaagaaggtcacggaattcgaaaacaccttcatcaagtgtgcgcacaagaatttccgcagtacccatatttgtggcgagcggaatggaatacacatcacataaacggattaatgccgagacatccggttcatgcggctgcgcggtcagcgggtcgcgcaaaaaaatgacaagatcgagtgcattggcagcgatcagtgcaccgatttgctggtctccccctaaagggccggattgaaaacgttcaatttgaagacctgtcgcctcatgaattttcaaccctgtggttccggttgcgtatagatcatgattctttaaaatatcccgataggcagtcgtaaattgaaccatatcctgttttttcttgtcatgcgcgatcaaagcaattttcattgtttatccccccgtctaatcaatgatattttctaaaccatacacaagctgatcaatcttcatgacttgttcgactgacagtttaacgcctgacatgaaagaagcacggttataagaatcatggcgtatctgaagcgtttggccatccatgccgaacatgacctcctgatgcgcgatcagtcccggaagacggacgctgtgcaagcgaataccgttttgctccgctcctcttgctcctgggagaatttctttttcatccggatgtccttgctgcttttctttacggacttctgaaatcatttccgctgttttaagcgcagttccgcttggtgcgtcaagcttctggtcatgatgaagctcaataatctcaacatcctcaaaatagttggcagccatttttgaaaatttcatcatcagtatcgcaccgagcgcaaaatttggcgcgatgatggctccgatccctttttcttctgttaaagatgtgagctcttttaaatcagcttctgagaaaccggttgttccgacaactggacggactccgtgctctaatgcaatttttgtatgtacttttccgatttcgggcgttgttaaatcaatcaagacatccggttgtgtttctgtaaaacaggcatggatatctgtataaatgaaagcatctgactcaacaggcatcacatcagataatttttgctgatcgtatgtatggtctatggccccgacaaggtcaaaatgaggtgttcgttctgccaatttaacagcttcctgccccattcttccacgcggtcccgcaatgactactttaattgtttcgtttgacatctcgatctcctctactttccttcttcttttctggtccagcgatctttatctcttgtattaaatttatgcatgactcggtcgtgggcttcctctaaagagatatcaagggagttggctaaacaaaccaatacaaatagcacatcgcccatttcctcttccatgcttttatcatcttcagtcgctttttttggtttttctccataacggtgattcacttctctggcaagctcgcccagttcttcagtcagcctcgccatcatggccagcgggctgaaatatccttctttaaattggccgatgtaacagtctacttcagcctgtatgtctttcattgttttatcactcactgaacgaaacctcctatcatcctcttacatgttagctaattcagatacgtttgacaaatgtttaagcacgtttgctgttttctttttcatccactataatataaacgctatctaatggaaggaaaaggggttttatgtgatgcttggagaaattagattaaaaaacatattttttattttaatcggagcggcaattttttcatttggcttggttcatttcaatatgcagaacaatctggctgagggcggttttacaggtattacacttttgctttatgcccttttccacatcagcccctctatatcgaacctggtgttgaacattccgattttttttattggctggcgtttgctcggcaggacaatgtttgtttatacccttgtcggcactgtagccttgtctttgttcctcagcatctttcagcgatatgaaatccatatgccccttcagcacgacttagcgctcgccgctttatttgccggcgtattcatcggagccggcctgggaattatttttaagttcggcggtacgacaggcggtgttgatatcatcgcacgtttagtgaataagtattttgggatcccgatgggcagaacgatgtttgctttcgatgcctgcgtcatcattttgtctttgcttacttatctctcctataaagaagcgatgtatacgctggtagctgtatttgtagcggcaagattaatcgattttattcaggaaggcggatacgctgctaaaggcgctacgatcatctcttcgaaaaacgacctgattcagaaaaagattcttgaagaaatggaacggggcgtcaccattttgaaaggacaaggctcctacacaaaagaggatatagatgtactttattgtgtggtgccgaaaaacgaattggtgatgctgaaaagcgtgattaactccattgatccccatgcctttgtagcggtaagcgatgttcacgatgtgctcggagaaggatttacgcttgatgaaaataaaaatccgcttccgcgctgacatgtaatagaaaaaaggcggctgaccgccgcccctcacccttatttagggtagtccctttttttcagcttgtttttttccgccttgtactttctgtaaccgacataggtaagagcagtaatgatgatactgccggttgtaatcatcacccagagtaaagacggatcggcatcatcctcctccaccctgtcaaacacatttttcaggtcatgctgaagaagggaaagccgttcaagcttcgtgctctctgtcatttgctgaaattcctcttgctcaataacatctatatgttttccgactgtttcaagctgatcctctgatacatcgattgtaagactggggtaaatcaagtcatataaactgataaattcattccatttttcatgaaagcttatgcttccattcttctggacatctcgcttcagctcagtaaaagcttccataatcggtttttccagtgagccccaaagcgggtcagaccgattgtcaaccgcatccatcagcattctgaactgcgcggctgctctgagtttttgtgtgtctgatgtatcagcttgctttaaactccgaaccatatcattatagcccaatgtgatttgacgaatttgggctcccgttagcatggggtcttgctgttttttctcagcggattttaatgttttttcaaaatactccaagacttgaagcgcctcttcatatttcgcctgtcgggtcatttgaaagactgtatcggataaatcattcaattcctcgaggcttccccgctctgcagccttggcatttccattataaaaaataagtgcaatcaacaaacagatcgtcagctttcgtttcatgcaggtccctcccactctctctccttacagaatatgaagaaagggacaaggatagaccaacattgtctttacatcagctcaagcttcgtttgtttttttgagaccacaagaaagtaagcaagcgcgattgaaaagatgcttagccaaaatgttccgtatcctatttcagtcatataatcagaaagcatagagtattgcggcatcatatcaaacaagtagtcaatgacatcgttatgcagtgtccagactgcagcaattgcaagatgccaaaatgaaaaacgaaaatacggactgtataatacgccttgaactgccattgcaaaatgcgaagcaattagcatgtagccctcccacggcaagtcaccagttactgcaagcacaagaaaattcatagccaccgcccataggccatactttacgagggtaactagcgcaagcgcctcaaagaacggagcattccgtttcatgagaaaggcaagcagcacaaacagaaagaaaaacgttgctgtcggactgtccggaacaaaaatcaggaaacgtgccggtgtctccaaaagctgcggcaagtaccaatagtagccgtaaaccgttcccagaaaattaatggctaagacaagaataagcatcggccgctgccctaatacatattgaaaccatttcacatcgaatcaactctcagtctgtaaaaataatatgtccaaataaaaaagctgacgccgggtcagcttttgataataaaagtatatccttccatttgacaattcacaatacgttattttgcggttgtttcagaaataaattttgcaagttcttcgagctgcttatcatttcctttgaacacacccgccggcattttgcctttcccttctacagcgatttttttgatttcatccggtttcagcccgctgtcaaccaatgaaggcccggccgctcctccctgaaggttatccccatggcaagaaatacagccctgttccttaaaaaccttatatccttctgcattggtgtcaatgtcggcttcttttgtaattttcccctgttcttctgccttggcccagtcatgagtagcaactgactgccacgtcaaaaatacagcagcggaaatggccagaagcatcataccgacagcgaccggacgcttccacggccttctttctgtccctctgtctaggaatggagccaaaagcagggccccaaaagcgagacctggcataatcatggcgccgaccactgtaaagcttccggcggcgtattcatacttcaacagctggtataagaaaagaaaataccaatccggcagcggaatatacccagtatcagtcgggtccgccatccgctccaaaggcggctgatgcacaatcgtcaaaacgagaaaaccgatgagaaagacagctccaaccatccattcctttaacaagaaatttggccagaaagcctctgttttacccggatactccgaataatccttcggtatattcggctttttttcagccggtatccttgagtcgcctacaaatttcatccctttgccccggtgcatgtcatcccctcccttttattcgcagatcaagagtttaaagcggtcctgaaatcccctgcttccggatcataataaaatgtgcagccatcagcccgaacaatgcggcaggaagaaaaaatacatggatcgcaaaaaacctagtcagcgtttgggcgcctacaatatccggatgccctgcaaggagcgttttaacttgcgttccgatcaaaggcgtagcttcggcgatctgcagcccgacttttgttgcaaacagagccttcatatcccaaggaagcaagtagcctgtaaagccaagaccgagcataacaaaaaagatcagcacaccgacaatccagttcagctcgcgcggttttttatacgcgccttggaaaaagaccctcagcgtatgtaaaaacatcatcacaatgaccaggctcgcaccccagtggtgcatccccctgacaatctggccgaatgccacttcattttgcaaataatataccgattcccaggcatttttgatatcaggcacataatacatcgttaaaaacattccagataatacttggataacggttacaaaaaacgtcagtcccccaaagcaatacacaaacgcagagaaatgatgggcgggattcacatgttccggtacttcgtgatcggcaatatccctccacatcggtgtaatatcaagccgctcgtctacccagtcataaattttgttcagcatgtcacccttcccccttaggctttgcttttccaagatacaggaagccgtcttttacttcttgctcataatgatcaagaggcgcaagcggcggcgtgccagggacattggtgccgtccttttcatagagtccgtaatggcatggacaaaagaatttattcgggtttttaggatcactattccagttcaccgtacaccctaaatgtttacaaattggcgaaagtgctacaatttcatccccgtttttgaagacccaggctgatcttgactcttctgactcataccaggcatcgacttgattaattttaaaatcaaagcgctgcggctcttttgtcaactcatcaacgctgacaacctgaaccatatcctgcttccctgtcgattttaataccgggtcgagtgcgaagcgaaccataggcatgagcatactagccgccataaaacctcctacacctgtgagcgtgtaattcaaaaattgacgtctggatatatcatgttttccgcccatctcttctcccccctctaggtcacccctgcaaactgactaaaatagaaaatattgcaataactctagacaccctcataatatatgaatctctcagcaaggtcaatatagccaaaatattgtttataaggaaatgtaagtgtttttatgaagtgctccataactgtaacaaaacgttcaaaatttcagcagtgcgttcatccaatatttttcttattaaagagtcatttaaatgctctaatggaacagacggtgtaacaatgattttgcctaacgcatcctcagctctccaactttcgtcagatgtgagcaggacaacatgcggaaattccgttatcagctcttcccgcaaatccttaagcccttgaacggttatttcatttctatcaacatatgtataaggcggaagtaaatatacccgtccctttaactgcctttcaagttcttctgagagaagctgcgtaaactcgcctttctccgccgccattttaaaatggttattaacccttatgttaattaatggtatgacagcggtatcaatgtaatccttagcttgtaaatagtccttggcatcagtgattctccacctcatcgttctccccctttacggcaacaagccttgcaattcactgcaaggctggtcatattatgtgagctgatttaattggcgcgataattgttcaaatgcctctttatcatgacgatctaacgcctcgtcaatgtcttttaataatttttctctttggaatgtggaaatagcgtgctctaaaatctgttccgccaatccctgatcttttttattctcaaaaaggtttttcggaatatgcgggttggactccagcaccgccgcatattcaggtgagctgtaagccgaacggaaattaagctggataaacaaatcctgctgtttatttaatctaatatcatgaaaagatttttccgcgtcggtagtcatgacattctctttatagaaccggaacggaacttcttcaacacaatgtgttgacattataatgcctctcgggcaaaattcagcctgctccacaaaatgaaccttctccatgagagaatcatggctcattaagtagttcaagatccaaacgcactctcggcgctttaactgataatggtttaaaaaccaacggataaaatcttttttctcattgacagaaacaggggtctgcatgtaattccctcctctatcgttcgtataatctatatacttatatgttccacatgaatggttaatattcctgcttatctagaaaattcatcctcgattcgcaaaatcgtttcttcaagctcttcattggctccgtccatttcaagaacctttttcaaaagcggcagcgcttctttttgaagaccttcttctaataggaagcttgcgtattcatataagaaatctctatcctcccggtaatgaagataggcagcctcaaaggattgttttgcttcctcgtattgctctaattcagtatatgcgcttgcaagataccaattgtatttaggatcttcttcaccgtagcttcgaacctcttgaataagatcaatgatctgatcataatcctcttctttgtgatacacggcaagaagtgtatgaagcgcctcgacaaagcccggatcaagcgcaagcgcctcctgaagcagcttcttcccctcttctgacttcccgattttcaaggccattttggcggcataaaggaaaagttctttgttatattcatcatatctgatcccctcttttgccgtttttaatgcctcttcatacattccttcagcttcatagcttttcgagagcggcatataaagtgaagtataagatggatcaagctcctttaaatcagacagctgcttaatagctgttttcacaagccccgcctgtaaggctgtaaaaccatagccgaaaatcgtattaggatcaggattctcatcgacagctttctcataccatggaatggcatcctcaaattcacctgaggcacttaacgattctgccagtctttgatggacattaacgcccccgatctcactctgctcctcagccgttgttttaaaatattgaaccgcttttgcataggctccctgagcaaagtaaagttctcccagtgcaaaatcaataacaggttcattgtccagaatggactttgcctggaaaagcttttgttcactgacttcgaataacccctgcatctgataaagatccgccataagcagcaaactttccggatatgatggatctgtttccggaatagtctccagcacagcgagggctttttcttcttcgtcaatatctattaaaagttcagcgtagaaattcgtcagttctgtttcatttggatataaatcatgtagatcactaatcagtgaaatggctttttctacatcgccccactcgtaataaagctgggctgcaatggctttatcttcatcatgcagctgtttttcagccttcgagagcgtgttgaggcctttttctgtttcacctgcttcaactaattttatggcttcttgaatcaatgtattcaaatcggaccggtcctttcttttcctatacaacatcaaccatacaaaaaagctttatttgttcgggttaatcttatcataattcagacgaatgcccccggcaaataagatgcttctgtacggaagggaattattgagtcttattagtttaccaaaagatcttgagatagaaaatgaaaaaaggaagatcgccctctgtacagtaaagcagctctttgacctgccggcttgtaagtaaagcacatcccccttttcgtttttctatcccctctataagacaagctatgttttttcgcctcgaattatgatctgcataaaaaatcctgaagtaaaacttcaggattttttcgaaagcttatttaaatgctcgaagaaggttggataagaaacgtgaatggcatccgtgtgctcgatttcaatcggctcctccgttatacaggaagcaataccaagcatcattccgattcgatgatctccgtggctggacactgccgcgccgcctttcaacgtttgtttgccataaaccttcattccatctgctgtcggttcaatttcagcacccagcttgcgaagctcagaaacaacagtatcaatacggtttgtttctttcacttttagctctgccgcgtccttgataacggtagttccttcagcctgagtcgcaagaagcgcgatgatagggatctcatcaattaaacgcggaatgatatctcctccgatttcaactgcctttagagatgacgtttctataatcaaatctccataaggctctgcaccgctatcagcagatggtttgatttcaagttttgcccccatgttttgaaggacatcaataatacctgtccgagtcggatttaaacctacgtttttcaatacaattctgctgtttggaaccatcgcgccagcagcaaggaaaaacgcggctgaagaaatgtctccaggaacaaaaatatcagcagctgtcagtttctggccaccagcaatggaaacactcgtttgatcttcagaaagcttaacgccaaaagcagaaagcatccgctcagtgtggtcccgagatttatggggctctgttacagttgttgtgccctcagcctgtaatccggccagcaaaacagcagatttaatttgcgcgcttgcaacaggtgatacataatcaattccttttaatgaagcgccgctcactgacagcggtgtaaactctccgccggctctgccgtcgattttagcccccatttttttcaaaggctcagtcacacgcttcattgggcgcttcgcaatgctctcatctccggctaccgcgctgtaaaaaggacggcccgccaatattccgagcatcaggcgaatggttgtacctgaatttccgacatctaaaaggctttctggctctttcagggcatcgattccttttccgtgaatcacgacatcgctgctgctttgctcaatgtgaacacccatttttctaaagcaatcgatcgtgctcagacaatctgctcccggcagaaagtttttaactgttgttgtgcctgccgctagcgcgccaaacataacagagcggtgagaaatggatttatcaccgggaatatgtatttctccatgtaaggtctgcaccttttctcgtttcattttttccacctcaatcagcataaaaagtttcatattccgcccgggcttcaatgcattgttctgcccttttgcggtcgtcatcagactgaaaactgatccttaaaatcccgttaatatcctctcgtgtttcgataatgcggatattcgtgatactgatgcgctccgcagctaagatcgctgttatctcggatattacacccggatgatcgggtacatccacatataaatcataaaatgcaggtatcgctcccttctgccgaagcggcagcccgtcgcgataatccttggcggttttaaaataacgaaatagattttccgcatcttcttgttctacatatgtacggatcttgtcaatttcacgaatccactcatcaaaacggtctaagattttatctttattatgtaataaaatatcccgccacattgccgggctgcttgatgcaatccttgtaatatctctgaatccgccggcagcaaaacgcttaacaagcggatacaggttttccgaatgatgggtttggtgaacaagactagctgctacaatatgcggaaaatgactgattacacttgtaacgccatcatgctcctccggcgacatttccacaaaatgggcattcgtacccttcagcagattttttaactgttccacagcttgtttgtctgttttctggcctggggttaaaatataaaatgcattttcaaacaggaactccttcgcagcggccactcctgatttatgtgaacccgccatcggatgccctccgacaaattgatagcggctaggcagcacttgatcagcgtaatcaaccactttttgctttgtgcttcctacatccgtaatcaaaagctcatgttcaattcctgaatgagccagcgcttcaagcataaccagtgtttgttcaacaggtgtcgcaatgattactgtagctgcctctttcgcaccgctaataaacgaatcagcacgatcgtctatcacgcctaattttaatgccgctaccgcctgttcatcagagatatcgattccgataatccgtttgccgggatgattttttttgatggctagggctatcgaaccgcctatcaatccgagaccggcgagcaatattgtatctttcatttgattcatacgtcatcacctggtttatagactaaagaggtgatattcgatcacctcttataaaatttcagctaaaatggcaagtatttcttcattttgctcttttgttccgatcgtaatccggagtgatgtcgggaaacctaatgcatttcctgaccggacgatatagcctttttccagcagagcctgaaacagttcatcagcaggacgtttaaagtcaattaacacaaaatttgtctgtgaagggtagcactttaaaccatgagttttcgcaaaatcataatactgctgaaggcctgcattattttgctcgacacaggaagcaataaacacttgatcatcaagtgcggcaatcgccgcagcctggcccagacggctcgtattaaacggctctctcgccggctcaatctggcgaatcaggttctcgtcagcaattccgtatccgactctgagcgctgccagaccgtatgcctttgaaaatgtgcgcaaaatcatcaaattggaatacttgcttaagagcggcacggtttccgggtaatcctctgctgttacatattcataatatgcttcgtcaagaacaacaaggacacgtgaaggaacgcgctccagaaatgcgagtaattctccttcagatgtataagtgccagtcggattattcgggctgcatatccaaacgacttgtgtctgttcgtcgatggcttctaacatggcgtctaaatcatgtgagccgtcgggacgaagtgcaatttcacgcacttcagcaccttcaataaccgcattatgtttatattgcggaaaagtcggggcagcagtgatcgtattggttttattgtttagaaatgcccggcagatgatctgaatgatttcatcagaaccgttgccgaaaataagtgatgtttcgctgacattgaggtgcttactgagccttgtccgcaaagcggcgctatacccgtccgggtaaagggctagctgttgaatctcatgatgaagcgcctcttttgcagcctctgaacagccgtaaggattctcgtttgaagcaagcttcacaactttatccaagccatattctgatttcactgcttcaatcggctttccaggctgataaggcttcagctgttttaaatgttctttgatacgcaaatcagtcacctcattttaaactgtacaagccgctaaacgccattgcataatcctcaaactcctgcagcgcctgatttctcgtttcagcgctgatgagccggtcctttaattcttctatttttctgacgagcgcacttcccactacgacaccgtcactaatttcattcatctttatgacctgttcacggtttgatataccgaaccctacagcgaccggaacagtgctgagattcttcactgtccgaatgaacgggtacacggatgaattgaactcattgcggacaccggtcacacccagagaagacacacagtagacgaagccctcggcttgttcaataatggttttcaaacggctttcgcttgtcggcgcaaccaaagaaatatacgtcacctcatggcttttacattcctcttgaaggctgttgctttcttctagtggcagatccggaacaagcagaccgtcaatatgattttcccgcagtaaagcgaaaaagtattctttgttcaattgtaacacaggattataatacgtaaagaggataatcggaatattcactccgttttttttcatttctccgcctaattcgattgcctttacgatattcattccttgatcaagtgcccgctttgaagcccgctggatcaccggaccgtctgcaagcgggtcagagtatgcaacaccaagctccaatgctgtggcgcctgctttttggagtgacttcgccagttcaatcgaaacctcaggaactggatcgcccaccgtaataaacgggataaacaatttttctgatggttgaagatcaaatttaaacatgggctttcacctcttcttccaatacattcattaatgtgttgacatccttgtctccccggcctgataaacagacgagaatgagttgaccgcgatccattcctttggcgagtttgaatgctttcgctaacgcatgggcagattcgattgccggcaaaatcccctctttttctgacaaaagctttaatgcatccaccgcttcttcatcagtgatactgtcataagtgacacggccgcttttatgcaagtatgcatgctccggaccgattccaggatagtcgagaccggctgaaatagagtagggctcaataatttgcccgaactcatcctgaatgagataagtcaatgaaccatgaataacccctacggttcctttcgaaatagtggcggcatgaagaggcgtatcaattccttttcctgctgcttcagcgccgatcagttcaacatcttcatttaaaaatgcctgaaacatacccatcgcattgcttcctccgcctacacatgccactactttatcaggcagagtgccttcaatacgtttcaactgatccttcgcttcctctccgatcattttttgaaattcacggaccacttgcggataaggatgcgggccgacaactgatccaatcatataaaagtgatcctcacaatgctgaacccagtaccggatcgcctcatttgtggcatccttcaatgttccgtttccgcttgttacaggcactacctccgctccaagaagcttcatgcggaaaacgttcagagactggcgggcaacatcctcttcacccataaacacagtacaggaaaagccgaatttggctgcaactgttgcagcggcaacaccatgctggccggcaccggtttcagcaatgattttcgttttgcccatttttttagcaagcagcgcttgacctagcgcattattgattttatgagaacctgtatggtttaaatcttctcgtttcaaatagattttcgcgccgcctaagtattcagtgactcgatcagcgtatgttaatgcagtcggccgtccggaatagtcctttaacagcttataatactcttcacgaaaagcggggtcatccttgatttgtttaaatgctgtttctatttcatctaacggctgcatgagtgtttccggaacaaactttcctccaaaatcaccgtatctgcctatttcattcggatatggatacatatcggttcatcctttcttctaaaagcctcatcagattctgatctttttgtccgtttttttcaattccgctggcaaggtcaattccttctggctgccatttcaataggctggtgatgctatccggattcacgccgccagcgataaagcagcgtttaccaatagccgcctgctgatattccggcacacattcccaagaaaatgcaacaccagttccgcctctagacccttttacagatgaatcaatcacaaagccgtcaacattatctttaaagcgggctatttcttgagttgtgttaccttgatggtgaagcgccttccatatttcacagcctgtcagcttgcgaagagcagcagcatccgccggtttttcatcaccgtgaagctgaatgacgtcgagcttcaagctcttggcaatacgtgacatcgtctctattgattcattaacaaaaacacctgcaacctgtttttcgacacgagcttggttcagccattttttcacatcttgcggagatacttttcgtttgctttcagcaaaaataaatcctaggtaatcagcctgtgattccgccgcaagctgcaaatcctttagtgaccgaataccgcaatattttaatgccggtttcttcacaacctcactccccaaacaaagcatggattgctttacgctgagaagtttgtctcatcaatgattcaccaataagtacagctcgcgccccatgttcattgacaaatgttaaatgttctaaagaaccgattccgctttcgctgacaagcaaggattctttcggaacgagagatgcgatttgttctgtctgctttacagatgtttcaaacgtttttaggtttcgattatttacgccgagaatgtcgggtgtgaacactttcaatatttgttctagcgttgatgcatcatgaacctccactaacacgtccatccccttttcacctgcttcaagatataattcatgaaggtgtaagggatcaagcacctcgccgattaacaatatggcatccgctccgattcttcttgattcctctacttgaagagaatcaataataaaatcttttctaagtacaggaatcgaaacagcacgctttacgtctgataaatagctgttttccccttgaaaaaacggggtgtctgttaaaacggaaatcgcatctgccttcgcagcctcatagtcttttgcaatctgcacaggcacaaaattctctttaataagcccttttgacggcgatgctttcttcacttcggcaatcaacccgataaaccgattcgggcttgccagcgcctccttaaatgaacgtttctcgaaaggctgctctaccggcaaaaccagtgttttcacttcttctttcttttgtttgatgattttttcaagcatagatctcttcctctttctgctttagtcgttcaagctgcgcggcagcgcctccgcttgtaatcgtctctaacgccagctccgttccttccttcagtgaggcggtaatccccgccgtgtaaatcgcagctcccgcattaaaagccgtaatagataaagcggaactgctgcttttattttcaaaaatattctgaatgagataggcgctctctttcggtgactgcacctgtaaatcttcaagtctgccatttgtgaaaccgaaatcttcgggtgaaacggtatattcccggcgctctccgtcctttaattcaatcacgtcggtcggtgctgtaattgaaagctcatctaaaccgtcacggcttgatacaaacatgacgtgcttcggctgaaacgtctccagtgcgcttgccatcagtccagctttttcaacagaatagaccccaatcacctgacgcttcgcctgtaaaggattgctgagcggcccaagcagattaaataccgttctgaaacctagctcttttctagtacctgctacatgtttcatagacgaatggtaaagcggcgcaaaaagaaatcccatgttgtttgtttcaatgctgcttttgaccttctcgggagtggtttgaatagaaacctctagctcctctaaaacatcagcgcttccgcttttagaagagacagagcgattgccatgcttagcgattttcgcgccagctgccgaggcaacaattgccgaggcagttgagatattaaaagtggaaataccgtctccccctgttccgcatgtatcaacaatatcaggaagtccatcgactgtaagagcgtgtgcccgcattgccttcacaaaacccgcaagctcttctggcgtctccccccgatgagcaagaatagacaatataccacccatttccgaaggagtcatttccgctgccatcatcatattcatcaacgtttcagcctcaccggcagtaaggttttttccgtcaacgcacaattgaagaaatttgttcatcagctttatcctccttgctatgaaacatgtcttctgcaatatgaatcgttttcagcagcgcaccggctttattacagctttcttcgtattcggcttctggaacagaatcagcaacaatgccagcacctgcctgtatcgatgcaacgccgttctttacactcatcgtgcgaatcgtaatacaagagtcgatattcccgtcaaacccaatgtaggcaatacaccctccgtatgtctctctcggtgttggctcgagctcttgcaaaagctgcatggcacggattttgggtgcgcctgttaaagtccccgccgggaaagcagacatcagtgcatcgacaggatgaaccccttttttcaatcggcctgtaaccaccgagataatgtgcatgacatgtgaaaaggagacaatttttgtgaactccggcacagaaacagaaccatactctgctactctgccgatatcgtttcgggcaagatcaacgagcatgtaatgctccgccttttctttttcatccttcatcagctcaaccttcagtctctcatcttcagctttgtctgcgccgcgttttctcgtaccggcaatcggatggatttctaagtgcccgtcttgaacgtgtattaaccgttccggagagctgccgactatttctctgtctagcagtttcatataatacatatacggcgaaggattgacgatcctaagcactcggtataactcaaaagcatctgcttttatcggcacctcaaatttttgtgataaaacaccctggaagatatctcctgcttttatatagcttttgattttttctacatcagccataaaagccgatttttcataattagaagataccgtctcaaagctgggtgtcttgtatgaatcagcagagagaaacagctcttttatttttttttggtccatcattttttcgatgagattttggagctccaaatgattttgatggaatacatccattttttcgttttctgtttcctctccagtgagccttgcatattggataaagtggacgtttttggtttcatgatcatacgcaattaatgtccggcaaacaaacagcatgcacttttccatgtctgtttcttttgtatgcgaaggaacagaaggctcaatcagcgggatcatatcatagcttaagtacccgacagctccgccgacaaaaggaatgccaagctgaggtgttttgattttgtatgtggtattcatccagttcagcacttcttttagttcatttcctgtgtaaagagatttgctgtcctgatcagcggccgaaaaacggccctgctcttctttaattgtgagaaatggatgcaggccgataaatgaatatctggaccaagtggatgtatcgtcctggctttcaagaagatacgtaatctccctgtcaagcttctctatcatttgaatgggtgtcagtgtatcgactgtgaaggtctccacaatcggtatcgtgtggtgggacaagctgtcctctaaaaatgcggaaatgtttgattggaaattcattactctcactccttatggcaaggagaatgagaagatggcatgagaggataaaatactatataacaaataaacccaaaagaaagacttcttttgggtagaataaacataatgtctcagctcaactaaactcattctctgctaccctattctctaactcaactcattctaattgctttatacacactcttgtgtatttctaagctgttcttatcgtattacaattcagtattttttgtcaatgataaatcgggcctcaatacgacggctttttctaaatatacatgtctgatctgatcctgagggacatctgtctggaccgtcatcatgactcttatgcactttttcagaccgcctgttacgtccatttcctgcatacatgttaccggtacatactgccatcctgaaagctcgcgaacagcttttgccgggaaaacagcgtgcaaatcaggtgtagccgacagaagcatttgaacaacatcttccggttttgtatgattttcttctatgattttctctaacagctgtttagttttttgtaaaatttcttcttcagtatcccgttcaactgtagttgctccgcgaattccgcgaatcatcatgatgtctcctccaatcgccatttgttcagccagctctcaagttcatttctggaaaatgtatgatcagcaactttccctaattcgttgagcacaataaactgaatcttcccgccacgggttttcttatcattcatcatacggtccaagagaaccgaagtttccgtctcttttctgatttgacttggataacccaggctttttagccagctgaccaaacgttttctgtccatttcacagcctacagtcttttcgcttatatataaagcaaactgcattccgagggctacggcatcaccgtgagtgatctgcccgtatccatattccgcctcaacggcatgaccgagcgtatgcccgaagtttaagtaagctcttatcccctcttctttttcatcctgctgaacgacagacgctttaattgaaatgcctttaaaaatcatgtcattcagctgatcattagtgatatcacgcagtgagtggatattcagcaactcctccagaaacgctctgtcatagataaaagcgtgtttaatcacttctgccattccggacctaagctctttttcaggcagagaacgcaggaaatctgtatcatagagcacggctttcggctgataaaacgcaccgattagattttttccaagcggatggttcacggctacttttcctccgactgcgctgtcatgcgccaagagcgtcgtaggcatttggatgaaatcaatgccgcgcataaaagtggcagccacaaaaccggcaagatcccctacaacaccgccaccgaatgcgatgatgcatgaggagcgatccaaatgaaaacgaatcgcttcactctgcaattttgtgtacatgtccatggattttgcctgctctccactcggtaccgtcacttttttcacaggccatttatcttgcagcaaatggagcatttcatcaccatacaggcggtccacttcttcatccgtgacaagcataatccttgttaaaggcctgtttaaagaggttaatagttcgcaagccttttttctgataccttgtccgataaaaacaggatatgacgaggaagcagtttgaacatgcagtgtcttcattaaaattccctcgacagttttctcatattctccacattttctctaatgcggtcaatttgatctaatccgaattgttcaacgactgcgttcgcaatttcccaagcgacagccgcttcagcgactacacttgccgcaggaacagcacagctgtctgaacgttcaatgctggcagaaaacggttctttcgtttcaatatcgacacttttcagcggtttatacaaagtcggaatcggcttcatgactccgcggacaacgattggcatccctgtcgtcatgccgccttccagtccgccaagtctgttagtagcacgggtgtatcctttttcctcgtcccaaatgatctcgtcatggacttcgcttccatttcggcctgccgcctcaaatccgatcccgaattccacacctttaaatgcattaattgacagtacagcggcagcaagcttgctatccagtttgcggtcataatggacatagctgcccacgcctaccggcattccctcgacaatgacttctactattccgccgatggaatctccgtttgcctttgcttcatcaatggcagccatcatttttttgcctgcctcttcatcgtagcatctgacaggagactcttccgttacgcgctgcaggtcttcaattgacgtatattctgttttttcagctttaacagcgccaatttgcaacacgtggcccgccaccttaatgccaagctcagaaagaatctttttagctacagcccctgccgccactctgacagttgtttcccttgctgaagaccgctcaagcacatttctcatatcacgatgattatatttaattgcaccgtttaagtcagcgtgcccaggtctaggtctggaaatctggcgcttcatttccttttcttcatcttctgtaattggagcggcgcccatgatttttgtccaatgcttccaatcgttattttcaactacgagagcaattggtgaaccgagtgtacgtgcatggcgcaccccgctcataattttggcctggtctttttcgatctgcatgcggcgaccgcggccgtgtcctttttggcgtctggcaagctcaaaattgatatcttcctccgttatgtaaagcccggcaggtacaccctcaataatggttgtcagttgggggccgtgtgattctccggctgttaaatatctcatgacttcttctcccttcatcacattaacgcttttaagtaagactactataacatatttttcagcaaaaagtcagtctatcttttttgataaaagaatgtatcggctgggactaggccaaatttctcgggattgaagatttgctcggtgctgccgacaaaaagaactccattcttcttcaagctatgtgccatttttaaatacagctcttccttcgcgctttctgtaaaataaataaatacattgcggcacacgattaagtcaaagtcttgttcataacgatccgccagcaaattgtgctttttgaatgtaatattctttttgatttccgttttcacttcataacttctatttgcgttttgcgtaaaataacgatctttcacagatagcggcacttcctgtaaagaccgctcctgataaacgccttttttggctttttccaaagctttttcatcaatatccgtcgccaaaatctgatagcccggaagacctttttgctggtccaaaagcatggcaagcgtgtatggctcctcacccgttgagcaggcggcactccaaatctttaaaggcctagaggtcttgattaacggcagaattgcagtctcaagaacttcccatcttttataattacgataaaattctgaaacattgatcgtcattctgtccaatgtttcatttaagagagcttgatccttttccaatgccgccgcaaagtccttaaagctttggaacccctttttctcataaagtgacgttagccttctcttcatttgtgcttctttatatagtgtcaaatcgactccggttaattgtttccattttgttgtaaatacgctgtatgtatccatctctactctcccagtctcgctgtctttttgtcctagtatagcttgttttatcaggaaattgtattgtttcaataaaaaaatcagcttttcagctgattttagatcgttgggaaaggcagaggtctgatgcacactgccaatcaaccctttattcactttaatgtaaacctttacaaaacagatcaaaaaccggcggcgttatatgttgccggctctgttgcttattttcacaatgattaatagatccagcctgccataagctgctgatatgatactaattcttcattcttaaagaaaatgttaatctcgcgttctgcactttcgagagaatcagagccgtggatgatgttttttccgacaaacatgccataatccccacgaatcgtaccaggtaaagcttctttagggtttgttttcccgatcagctgtctcgtcacttcaatgacattttcgccttcccacaccattgcgaatacaggtcctgaagtaataaactcaacgagctctccgaagaaaggcttaccttgatgttcggcgtagtgtttctcagccatttgttcagtcactctcattaacttggcgccagctaattgtaagcccttacgttcgaatctagataaaatgtccccaatgagctgacgttggacaccgtctggtttcaccatgataaaagtcttttccatcatattctccaccccatcattatgtatgtataggctttcacactgcacaccgaaatcgtaacatctttctgataattaatcaatccggggcggagaaatttcttaatatctacaaaaattaaaattttcttttaccgatatattttgcgatggctgcaagagacgagcgtgcgcgccctcgaggaagcgtgtttaatttctgaaaagctttctgcagatacatttcgcttactgccatagatgcttcaattgcatctgtttttttgatttcttcaatgattggttcaagctgttcctgcgttgtctcactgttaatcaatttaagctggttttttaatgcaggatttttcagggcatacagcactggcaatgtgacgtttccttgaagcaaatctcctcctacgggtttacccagctcttcctcagttgaagtaaaatcaagaatatcatcaataatctgataagacatgccgacgtaatacccaaaccagtacaatgccttatgaatcttctcatcagctccagacgcaatggcaccaagctggcagctgaccgcgatcaagagagctgtttttcttttgatacggcggagatacgttctgagattttgttccatgttgtatttgtctttgatctgctcaatttcccctagacaaacttcaacgatcgtctgtgacaaaatcctatgggctttcggttcgttaattctcgtcatcatttcaagagatcccgcaagcatataatcgcctgtgtacatcgcaatacgattgtcccactttgctttgattgtcggttttcctcggcgaagctctgcatcatcaatgacatcatcatgaaccaaagatgccatgtgaatcatttccagagtgacggcgacatatttaatcttattaatatcgtaatcgccaaacatgccagaaagcagcacgaaaacaggccgaatacgtttccctccggcctgcagcaggtgaagacctgcctcgcttaaaagcgggtaatcggaacgtacggtttgttcaagttctctttcgattacatcaatatcgtcatttaaaaaagagtaggccattttaaatttcatatcattcacccaaacatctgtgttttcatttccatccgatatgcgtggcagcgactccgccagtaaacgaatgatatttaacatttttcaggcccgcctcttcaaacaggcctgccagttccttcattccagggaaatctctggctgattcttgaagccaagaatattctttatagctcttcgcaaacagtttcccgaaaaacggcataatatacttaaagtacataaagtaagcctgtctgaatccgaacatttccggctgggacgtttccagacataccacctgcccacccggcttcactacacgtctcatctctttcagtacagtcaagtaatcagggacattgcggagtccgaagccaatggtgacataatcaaatgtatcatcatcaaaaggaagctccatcgcatttccgtgcagcagttcaatttggctgaatccgccgtcttttactttctgctcgccgacactcagcatattttcactgaaatccaagcccttgatctcgccgcttttgccggccgcttttgcaagagcgatcgtccagtcagccgttccgcagcagacatcaagtgctgttgcgccttcttttacattcatgatgcgcatcgttttgtcgcgccattttttatgctgctgaaaactgatgacagagttcatttggtcatagtttttatatattttttcaaatactccgtgtacgcgctgttcttttgagtcctgcataatggtttacccttcttccactttctgatgataggtttgatcttggctgattgtcttcagacggtttattaaaatgttctgaataggtgaatttagaggcagaagtgactcaatgctgtttttcgcttttttaaaacaatcttctaatatctcttcttttgtttttcccagctgtataaaactcccgatcacatccagaaatgcatcatttccgttcataagccgcttaaatacaaaaaaatcactcgacagctttttccagcgcggaaggttgaagtgttccgccacacgatggaataaagctgattcaacgatgccgacactttcgaaaaaatcgttttcgtccttgaaagaacggtcatacagacgaattttatgttcgttgatttctttaatggctgtagcaagcgtccgaatcatgtagatatccttcatttcagatagtaaagagtagtacagcccgctgaaataatcgcccgcgagaacagtcaattggcggtttttgttttcgtctcgttttatgactctagctgtcgtcacttcatcatgggtatcaagggcgctttgtacaagcatcgctgttacaatataattttctctgtcgttgttttttatgtcagcttcttcaaataaagcatgaaaaagaagaagcttatcctcatcaattttcggcgcggaaatatgcttcgctaaataaggatgagacagcttttgttttaatttcttgttcagattggctaaagttccgtagatgtcttgcaaaaatatcacccttgtccccaaattcacatttatttcttaatctatgtatgagttttatcttttcattcgcttacgcaggtatcattatagcataaaaaaaagaaattggctgtatcctcccgctgtttgcgagcatttgcttttaacagcggggacagccagcttattttttttcgcttttcatttctccgtacgcggtttgaatcagtgcctctcctctgactttaatggcagaagtatgctctgtaaactgagcgatgatcacttctcccttgtcgagtttttcggaatggtgaaactttgtgtctgttcctcttgtcaggccgatcacattcactccgtcctcaacggctttaatgacgacaaaatcacttgaatgcttttggttcatttatagcaccctctatctttattagtcctggcgtttaatatgttccaatacttctgcacgggcagcggcatcatctttaaaaacgcctctgactgctgaagtcacagttttcgcacccggttttcttacaccgcgcatcgtcatgcacatgtgttccgcttcaaccactaccattacgccatgcggatcaagcgtttctacgatgctttctgcaattgtagaagtgatgcgttcctgaagctgcgggcgctttgcaacggcttcaacggcacgtgccagtttgctgagtcctgtgacctttccgcctcgcgggatatatgcaacatgtgcttttccataaaagggaacaaggtgatgctcacacatagaatgaaacgcgatatcttttacaagaacaagctcctcatggttttcaccgaagatagtctggaaatgttcttttggatcttcattcaagccggagaatacttcggcatacatctttgcgactcttttcggagtatcaagaagcccttctctattcgggtcttctccgatcgcttctaaaatttgacgaacagcttgttcgatttgctctttattaacttctttcatgttctatgtcctccaccaatgaatacatttaatttcgattctagcacatatgccccgctaaaagcaaagtgaatgccctgtcaggaagcccatgctcttgaaatatgaaaagccccttagaaaggggcttttctgtgaagaaataaagtgtatgtaagctagatgcatacacgatctatattcacaattattttccggcaactgcgtctttaagcgctttacctggtttgaaagcaggtactttgcttgctggaatttcgatttcttcacctgtttgaggattgcgtcctttacgtgcagaacgttcacgcacctcgaagttaccaaaaccgatcagttggattttatcaccgtttttaagtgcatctaagatcgtatcaaaaacagagtcaactgcttttgtagcgtcttttttagacaattcgcttgcttctgcaaccgcattgataagttctgttttgttcatgcctttcacctcctcccaaaaggatacattcagttcgtttattatcatttcttcacagttcagtctgattctaaacctgtctcagaaaaaaatgagagcaagtaagagaaagacaattaaacggctttttaagaaaaactgcactctgaggaatgtttgtccaacaaagtgaagaatttctgtatgtagagtaacacatataaaaagccatatcaagcattttaaagcgtcaatcccttgctcgtcaaggatttaaggtgatttaccgaacaaatattcctttttttccttttttcatcctattccttgatccttttccattattaagaacaaagaaaaaagacctcccattctataaagaggtctaccggtattacaggatgatggcgattaagccgccagagccttcgtttatgattctttctaatgtttcttttaatttataccgtgcgttttcaggcattaatgacagctttgcctgaatcccttctctcacaattgagctcagcgaccttccgaagatatcggaattccagatggagagcggatcatcctcaaagtcctgcattaaatagcgtacaagctcttcactttgtttttccgttccgataatcggggcgaattcgctttcgacatcgactttgatcatatggatcgacggagcgacagctttcagcctcacaccgaatcgtgagccctgccttataatttccggctcatcgagactcatatcagctaaagcaggcgctgcaatgccgtatcccgtctgtttgaccatttttaaggcatcagacacttgatcatattctgttttcgcatgggcgaagtcttgcatgagctcaagcagatggtctcttcctctgatttcgacgcccacaacttcttttaggatttgatcatatagatgatcaggcgcgtacaaatcaatttctgccaccccttggcccagctcaattccggctaatccggcactttcaatgaattcaaactcgctgaattggccgacaaccctgtctacgtcccggagccgtttaatatccttaaccgtttccttcacggactcctgatagctttcacgcagccaatggttttctttcagcaccattacccagcttgggagattgacattcacttctagcaccggaaactcgtagagggcctctctgagcacactcagcacatctgattcccgcatgctctctacactcattgccaataccgggatatcatatttttcgcttaaatcctggcgcatggcttccgtttccgggtgatacggcctgactgagttgatgaccataataaaaggtttgccaacctctttcagctcttcaatgactctttcttcagcctctatatagtcacttctggcgatatctccaatggtgccgtctgtcgtaatgacaactccgatggtcgagtgttcttgaatgacttttcgagtgccgatttcagcagcctcatgaaatgggatcggttcttcgtaccaaggcgtattgatcatccgcggcccgttttcatcttcgtatcctttagcgccgggcactgtgtaacctacacaatctactaatcttatattcacatcgagtccgtctgacacatgaacagacatcgcctgattcggaacaaatttaggctctgtagtcataatggttttgccggctgcgctctgcggcagttcatcctgcgctcgggcccggtctgcttcgttactgatattcgggagcaccacaagctccataaattttttaatgaacgtggattttcctgtacggacagcacctacgactcctaagtatatatcgcctcctgttcgttcagcgatatccttgaaaatatcgaccttttccaagtgatcccctcccggacttcctatccttttcaattttattaagctctttcaatcaaacacaggacactatatgtgtatgacgttgtcctatttgaatatgacatctttagaaaatttctcatcctcaatctattaaagtataaaaaaacctttctccctatttgtatgcaagggagaaaggttcattcctttttcatatcattttctaaaaaaacaggttcctgtttgtcatttaccgtatattttacagaaaacgcggggacaaagggggtatcctgccaaatcatatcctggatttcagtcccgggtttaaacgtttttttgctttttttgaggcaagaagccagctcagtccggtaatcggcatatatttctccgtctccgtcaatcataagcggcaaggaattccctgagattgggcttgtcactgtaagagagcttccatccccaagcttcttctcatcgagtgtaaataaatcacgagatagcacatccttgtaaggcggatattgatgctcctgacgatacatttggatgcgcaatttcacatcgcgaattttttctgccatctttagatcaattaatttaacagtcggatcgttctctacgtcaacaagcacgtattgatagtctcccccgctttcaaatgccgtacttggaggttcagctatgtatcttggcgctaaccggttaaagtctatcggatatttttgatatagcggtgtcgacatatctttggtttgaataggaagcagccctccatttgccttttgaaattcatcaacagcagattgaacctgctttagctggtcttgataaggaatggcatgcacactgcttttccgttcatttggatataaacatccggataaaaacacgactgccgcaaaaatgattgcgcacttcagtttacccatacagcacttccttttacagctttattcattgacagggccgctaaaaaccacgacaaacacaataattccagatatgagcatacacatgtatgcgaatgatgaaatcgcaatcttcaaaaaacggttttggcacttaaagcggcttaaatagatggaagctacagccagaaacatcagacccatggaccctagagcaaaccacattttcatcaatgccagattcaatgacgtgcgcctccccgatatgtatgatgtaagcgttatattatattttaatatacagcgccggaaaagatcaaccagattttccatccattgatagaacaaaaaaactgaagcaaagagggggaccttcgcttcagtcaacttgactatattcacctgcacgtttaagaaacactctcttggacttcgatgctatagtatgcgacttggcatacagatgcatcctctattgcctaaatcggcaaaatgtttcaggagatcccaagacttgggtgttcttctgtttttcgggctttcgttcaattaagatatgcgtttcatcataccattgacacttttacttcacttgattttcaaacgtatttaccaaatcctccatctcgtgggttttccctcttgccattaaagattcaacagcggtttccactttttgtccgttgaacaggacctgatggagagcttctgtaatcggcattttaacatcatatttcttcgaaagctgataagccgctttcgtcgtgcggacgccttcgactaccattcccatctcttcaagaacatcttcaagcttgtacccttttccgagcaaattgcccgcacgccagtttctggaatgaacacttgtgcacgtcacaatcagatcgcctactcctgtcaatccagagaacgtcaagggatttccgcccattttcgttccgagtctcgcgatttcggcaagtccgcgtgtaatcaaagcagctttggcattgtcgccgtaccctaaaccatctgtaattcctgcagcaagggcaataatattttttaaagcccctccgatttcaactccgataatgtcaggatttgtgtacacccgaaaattgtgattaataaatagatcctgcacctcttctgctgccctcatgctctttgaagatgcagtaacagttgtggggtgccgcagccctacttcttccgcatgactcgggccggaaaggacaacgatatcttttctgacatcactcgggagctcaatttccataatttcagaaatgcgcagaagtgaatctggctcaatacccttgctgacatgaacaaagactgcctttttcgttataaaagggacagcctgtctcagcacttcccgaattgcttttgtcgggaccgcaacgataatgaaatctgcgtctgaaacagcctctttcatatctgttgttcctttaatggatgtagacagcttaacattcggcaaataatctttgttttcatgcaactcattaatttgatgaattaaatctgcacggtgagcccacacacacacttcatttccattatcagttagaactaaagccagtgctgttccccaactccctgctccaagcattgtgacttttttcatgtttgattcacacctttttattttctagctcttgcaaatattttgattggtgtcccctcaaaaccgaacgcgtctctgattcggttttctaaaaaccgttcgtatgaaaaatgcatcaattccggatcgtttacaaacacaacgaagcttggcggctttaccgacacttgagtcgcatagtaaatcttcaaacgagaaccgttatgagtcggtgtcggattcattgccacagcatccatgatgacatcatttaagacgttcgtctgaactcgaagtgaatgattttcacttgctttaataatcgcaggcatcagcgtatggatccgttttttcgttaaggcagacataaataggattggcgcataatccagaaattgaaaatgatcgcgaatattttcttcaaattctttcatcgtgctctcatctttgtcaacagcatcccatttgtttacgacgatgacgacggccttgcccgcttcgtgtgcatagccggcgatgcgcttatcctgttcaataatgccttcttcgccatccagcacaaccgccacgacttctgagcggtcaatcgctttcagcgcccgcagtacactatacttctcagtcgtttcatagacttttcctttttttcgcatacctgcagtatcgacaatgacaaactcctgctggttgtaagtaaatgacgtatcaacagcatctcttgtcgttccagccacgttgctgacaataacgcgttcttcgccgagcatcgcattcacaagtgaggactttccgacatttggacgtccgatcagacagaattgaataacttcttcattgtatttcgtttcaggaatgtttttaaaatgctctgcaacggcatccagtaaatcacccagtccgagtccgtgtgttcccgaaattggatatggctcgccaaagcctagcgaataaaaatcataaatattcgctctcatttctgtgttatccagtttattaaccgctaaaacaacaggcttttttgtgcggtacaaaattttcgccacttcttcatcagcagctgtcacaccttcacggccgttcaccataaaaataatcacgtccgcttcatccatggcgatttcagcctgctggcgaatctgcgctaagaacggctcatcaccgatatcaataccgcccgtatcaatcaaattaaaatcataattcagccattcagccgagctgtatatccgatcccttgtcacgccaggggtatcttctactattgaaattctttctcccgcaatccggttaaagattgtggattttcctacatttggtctcccgacaatggctacgacaggtttacccatagtacccttcctttcaatccagccgctttcatttttacataaattttcaaccggttattaaattcatttcattcacttttatgaaaagaaacccttcagaggaagggcttaactcatttattatatcagtttttactgggatcacaactattcttaaaaatgtttcacgatcaaatacacgtcatctccgattctgtgagctattccatcaaggatcgcctcaagatttttagcgaaaagctccatctccttttggtcattgcaaaaaaagacaggtgctccccctgcaacccggtttggatttgtcgtgattacagacaaaatcactttcgtaagagattcactcatcctatcaccttatcctgattcttgataaattcagtcggcattctaatcgcattttccaaggttggaacattgctaataatttgaacagccgtttcgggatggtgaatttgcgggagaacaaatactgccactctcccatcatttaaatcccgttttgcaattggtgtcaaagatggctctcctgaatcccgataaaccccgagcacattggaaacatcaaataaaatggcctgacgctgccctaaatttgctatcgtcgctgctgaattaaagtttttcggcgttaaaataaagcccatgccatgctttaaaatcagttcctgtttctctggaagcccgatattcatcatataaatattatcaacaaacagtcccggaccgtcaaagcgcggctttatgtactcgatgtctacaatatccttcaacacactgcccgacataaatttcatggccagtaaaaaacaaacgacagccgctatgacagcagcccagatggataaaaacacatacgcagaggttgtcaaaagcgctgtaaagatcacaatataatttctgctttcaaacgcaatggcaatcccctcaatatatgtgctaccccttgagacaagttcatacgaatccatttgcgtcaatgtgttccgctccatgtttcggacatctctaaattgcgtcgctgccaatgttaaaaatgtgatggccgtaaattcctcctgcaaaagcgccggcataataattgcacctaaaccagccgctatcaaccccagtgcgatgtgaatcactttcccatgaacataggtcggatactggcggtaatccgttttcagcatataaagccttgtcgcaattccggcaatgaccccaacaataatcggatagatgtaatcactcatgacattttggtagctcctttgtttgatcttttgcttttctgaccaatctggcttgcgaggtattcgtatttagatatgccaaacagcaatatcatccccgcagaacacgcattcagccattgaaagccgccgacagccatagccccggccaacttctggatcacaaatgaatacaccagttcgccttggcacatccctaggacaaataagacaagctgcttctcaaaattcctatcaacagaagctgttaaaagcactattaatataacagcagcccactcaggttttatgatgaaccaaaccgggtcatataatgcaaaaagataaacaaacgcatacgcggaaacaagcgtcagatagaccatgatgtaacgaaaacgatacattcccaaatacccggcatagacacatccgcaaacgaaaaacatcaaatatgcagcattcagggaaaaatataaagcgatgtcatgtatgcttagaataatattagttaaaataaagacagagacggcaattcgtcttttcgtcttttcaaaaataaatgttgtcagaacccacagaaaccacattgaccaatagtaataaaattgttccattttacttcctccatattcccagtatggagttcaagcacattttttaaacaatcgatctcatattaaggagtatgatcatgggaaaagacagacaagagaaaaaactcaaagcttcaggcagagtcgaatcagaccgcgaccagtccattcactatgacggagcgacaagccttgaacaaaacggaagattcaaaaagcgaaaatcataatacaaaaagcccaaaccacatatggttttgggcttttatcatttatcgcacactatagcttgatgtattgatccctctctctgtgagccaatgatgggtttcacctttgatcacaaggggcgccttttgtaaatcggcaatcgttctggtgcccagcacggtcataatcatctttaattcctcaaggatcagctgaatctcctcaagcagtccttcctcaccgctgtcagtcagggcttttaaaaaatgccctgccattccggtgcaagaggccccaagcgcaatggcctttgccacatcaagtgcatcttgcagaccaccagaagcgatcatggtgcttgcaggaaactcggagcggatttccgccaaacttgcagcggtcgaaatgccccacgagttaaaaaaggagatttgccgctgtcttcggagattttcgattttcgagaaatttgttcccccgtaaccgccaatgtcaacagctgcagcaccagcttcatacagctttcctgctgattctttgctcataccgaatccgacttctttcacaatgactggtacgctgacatgactgcaaatttgttcaatgcgttccagtgcgccgctaaagcttctgtctccttcaggcatcacaatttcctgaatcacattgaggtggatctgcagtgcgtttgccccaatcatctcaacggcttcctttgcctgggcagccgttgcctcgcttcccaggttggcaaaaatcagcccgtttgggttttcctttcgaacaatttcataggaaagacgctctgatggatcttttaatgctgacatttgcgatcccacagcaaggggaattccagcctgagaagccgctcgcgcaagcgatttattaatctcatatgtaagttttccaccgccgccagtcattgcattgataaaaatcggcgaactgcttgaaagttcgccgatttttgtggaaatatctacttgttctaatgcaagatcgggcagactgacgtgaacaaacgtaatatcatcaagacctgtttcccgcttctggccggtggacaaggcatgattgatgtgttgtctttttcgttctgctcgagtcacgtttatcaccaattattttagtttattcagcttatctccgatcagatctccaagctggaagccagtgcttgtttcttccttcgcttgatattgacggtaatcttcctgatcagctttaggcgtttcttcaagttcacgcatgcttaatgaaatgcgctcctcattttcattcacatcaagaaccttcacttttacagtctgtccttcttcaaggacttcatgcggcgtgccgatgtgtttattggaaatttgagaaatatgaacgagaccttcaacacctggaaggatttcaacaaaggcaccgaagcttacaagacgctgtacagttccttcaagcacatcgccaggcttcactttttcgccgatttggctccaaggtccaggcagtgtatctttgattgataaagaaatacgttcgttgtcacggtcaaccgataacactttcacttttacttcttgtccctcttcaacaacgtcagacggtttctctacatgagagtgggaaagctgtgaaatgtgtacaagtccgtcgatgccgccgatatcaacaaatgcgccaaagtcagtcaggcgctgtactttgccatcaagtacacttccaacttcaagagactgaagaagttcttgttttttattcgcttgctcactttcaacaacagcacggtgtgaaaggatcacgcggtttttatcacggtcaagctctacaacgagcagtgacagtgtttttcctttatagtcagtgaagtcttcaacgaaatgtgcttcaacaagtgatgccggaataaaaccgcgaacgccgatatcaacgacaaggccgcctttcacgacatctttcacttcagcttcaaacacttcttttgtttcaaattttttctcaaggtcttcccaagcgcggtctgcatcaacagcacgtttagataaaatcaaagcatcgtcttccacttttgttactttcaggtcaagctcgtcgtctactttaacaacatccgatgctttctctacatgaagacttgataattcactgattggaataataccggattgtttgacattgatgatttctacatctacatgtttgtcttctacctttgtcacaatccctttaactacatctccaacctctggcacttgaacatcaatttgattcatttcctctgtcatttgaataacctccttggtccaaacctacacagcttaattaaaacggtttgaaagctgaacatataacatgcccgcttttagccgaatatgtattaaagaatcatccaaaaaagttttttgaatgatcaataaaaagttttattagtattaacttctaataaaaggacaggtttgtcaagcaataacattctatcttcgttgaaaaattcaaaaaaagtggcatttgccatcctcagcgggacttttgctccacagcctcgaggattttatcagctacctcttgaatggaaagcgatgtcgtgtcgatttcaagagcgtcttctgctttacgcaacggagatacttcgcgctctgaatcaagcttgtctcttcttgcaatttcctcaattaatgtttcgaagttgacatcaaagccttttttcacattttcttcataacgacgtttcgctctctcttcaacagatgccaaaagaaagatttttacttctgcatttggcagcacatgcgtcccgatgtcacgaccatccatgacgacgccgcctttttccccaagctgctgctggcgtttcaccatctcttctctgacacttctgtgcttggccgcaattgaaacttggttgctgacttcatctgttctgatcgcctcagttacatcggtgccgtttacaagcactttttgtccatcttttgttgtaatcagctcaatgtctgtccgctttagcagctcagccagtttttcttcatctgtcagatcaacgttttcctgtaaagccgcgtacgtaatcgcccgatacatcgctcctgtatcaatatatatgtacgattttttctcagccacaattttggcaacggtgcttttccccgcagctgccgggccgtcgattgcaatcgataatttcttttccataattcctctccttgctcttttctcctctatggattgtatcacgaactttatgaaaaagggtgaaaaattgatgaataattaatgtttgaaggtttcaatcctattgttttcctccattttatccaccccttcatattgaatcacttttgatacgtatggttcaatatgctgatagtgaaaaagaaattggacaccaagtaaaatgatggcctgaatgaacaataatttgatcagcagccgttcaaatgttttcattggagcacctccattacaaatagtatggaagtgtttgccgatgtttattccattcgggcctttcttctcttatttaactggcgcctgatgcagtattgaagcaaagcctgctggtcacctgctgcaatttctgaatactctaaagtcatttttcgtttttctgacttggggtcattaaagattcgtctgacaactgcttctgtttctatttgacgtgtgtgctcctcttcaggaagacggatgatcaggcgcaatgattcccccgattgaaaagaaaggccatcagctaaaaccacggcgatgccgcctgcactgatgttataagatagtgtgcggatctcttcctcatttcccggctgaatttgcacatctaataccgcatcagttcttacatattggcggcgctggattcttttcattttttcacggggaggcacttcaagacagatcatttgaagtttgtccttcactttaccttttatacggcttataaagcgataaggaacttcgtcttttcccacaaactctaccgttacttccatatcgttatgtaaaatcacagttcgccctgtaactacatcaacaggatacgcgatcaaaagttcattgttttcgatgctgaccgccttgctttttgcctttttcaattcattttcttctatatattctaaaagtacagtttctccaatctctatcattgacttcactctttcgcattcaatatactcacgtttttattaaagcacgtaatgaaaaaaaggaaaagacatttagtcctttcctcctgttttttataggtctttatatataggttctgcattttttagtttttcaaccttttcttccgatccgtctttggcattgatatacattctgaaagtgtcattttcaattgttccaagcatttcgtaacataacacttcttgacctagttcatttgtaatcaaagcgagccttgtttctctcacttgtacatttttatttaatttagactttgcctctgcttcagtaattgcaggcttaggtatggttctttttctgtgagatgtgaggaagtctcttgctgaaaagccgacaacctcaccgtcatccaaggccactttcatacgaattgcctccgggtacatccggactttattttcaacaggaacatatgaaaatacaccgattttatcatattgggcactttcatcaatttccaaatcatctgtttcaaatccgtttttctttaaaaatgcaagcgctcggttcgatccgtcatttaaactgattttctgatctttcacttccctgttttggatcaagtataccggatgcccgcccttcttcgtaatatccatataaatcactgctttatggtctgggtctttcatgctgatgctatatacatcgcgatttgttttttttccgctctttaccactttaattgaataattgtcatctggggcaaagcgctcagcaatttgttttgcttcctgttcggaaatttgttttcccttcagatggctgaagcctttctcttcttttttcgtactggtgaagctcgggccaagatcagtgccagtggagaatgcaccaacatttttttcgactgttttaaagctgttgataatcgtattatcactttgtttttcgtcagaagccagggccatttctacgtccatccagcgaaggtttttgctcatgacaaggtgctgaacatgacgcaattcattttgtatatcttcggactgctgatatagcttatttagtgatgtatactcgtttttatcaagcggcttttggtccaaatctctgactgacgttttatagctgaaatcgccgatctttgataatagctcttcagttttattaaacggcattaatgtaagcggcagctgactgacactgttatgagcttctgatgtaatcctccacacatcgatcaatgcaggcgacagtgatttttggctgttcatggcaagtgttgttccgattttatcatgaagctgatccatctgataggtaagctcatgaaacgcccgctgatagttattttcagcatgaagaagaactgcgtctttttcctggtgttctttgtatccccagtagcctgtaccgactattgcaataccaagcacggcgattaaaattcctctgatcatttatcacacctctttttatgctttctcatatctgctactcacagaaaatgtgtttaccgattcttttaatctgcggacgcccccaaatccacggacttgtagccgtatccggattaaagtagtaaagtgcttcccctgatgggtcccagccattgatggcatccagcactgcttctcgtgccgtttcattcggctgcatgtaaatttgtccgtcggctactgctgtgaaggcaagcggctcaaaaataacccccgctactgaatttggaaataacgggctgttcaaacggtttaaaatgactgctgcaatagcaacctgcccctcgtacggctcgccccgggcttcgccataaaccgcttgagcaagcagcctgatatcgttgttggaaaatccaccaggcatgttcgctgctaccgcatcctgttttcttgcttttgctggtgtattgttttgctgtttattcgcattcgctttaggctgctgcgttgttttttccgcaggctgtttctgccgtgcttctgcttgttgtcttgccttttgtgttgctgcttttgatggtttcgtctgatactttagcggaatttttccgtaatgcgtgaatgtattccctttattgagctgttccatgacatattcacgatagtattttgatttacatattaaggtttgctttgttttagctcctacaaggccgtcaacctcttttaacccgaattgatcctgaaaatttcgaactgcccagtacgtcccccatccataaaccccgtcaatttttccgttataatatccgttgtattgaagacgcgcctgaagctcgaccacatcatccccggttgcccctctttgaatgacctgattcgaaaaggcagagatcgtttcagtattaataaacgccgttattgtaaaggaaaaaaggatgagacatgccataatcgatcctttggacttcatcttttcaagcctcctactgcaaatttttaagtgtaatcgtattttctgtaacgaggttatttttatacactctttccttgttatccctcagaacataaaaactgcacacaaaaaagccgcacggttgctgtgcggcttctatacttgcatcatattaacggaacgggcttttttcgctttacgcaaaccaaaccaccataaaaataccataaatggaagcatataataaatccaattgctaagcgctgttaggataaaatcatatgatccatgcaaaagggatgggaccactaaagaaagagtaagccactttacacgcgccttatcagcggaaaaacgggcttttccaaggtaaaatcccattataacgccaatcaaggcatggcatgaaacaggcagcagcgccctgacaaacgcatgctccacgccgtggccaattaaataaagaatattttcgagggttgcaaaaccgagtgatacacttgtaccgtacacaatcccgtcataatgctcatcaaagtgggcgtgcgggtaaacactgatcatcagtataaaccattttaatgattcctccaaaaaccccgaagataaaaaagaaacgaaaaagcttccgcctcctacattctctttttcaagtacatactggataaacattatgggaaatacaagaacaaccccgagaaaaaacgaccgtagcaccatatgtacaggttcattatcatactgatcttttaaataaaaataacttaataacgcgatgccgggggcaattcctgcagagatgattgcaaacatcaggcaacctctttcctttatattcctacgtctatcctaccatgttgtttaaaattttacatctgtctgcacttaaaaaaacataaagagcatacgaatgcatcatatgctcctcatctttaatggttttctcttttggcgatttccgctgcgatatgcccccgtgaaacctgccgttttcaataaatatttcatttgcattgtttcccgcagcaataacaccggcaataaagacaccttcaacgttcgtttccatcgtttcttcgttgaaatatggacgccctgtttctttatcaatttcaacaccaattttttcaagaaattgatgatcaggatgatagcctgtcatggcaaatacaaaatcatttttaatggtaatgagttctttctctccggagcgaaacacaacttcatcctcggtgattttttcgacacaagcgccaaattccatacggattgtaccgtttctgacgagagcttcaaattccggcagaatccacggcttaatgcttggagaatactcattgcccctatataaaactgtgacacgcgccccagatttcacgagttcaagggcggcgtccacgcttgaatttttcccgccgatgacaacaacatctttatcaaaatacgggtggccttctttaaaataatgaaatactttcggcaaatcctcaccgggtatattcatatagtttggatgatcataatagcctgtggcgatgatacaatatggcgtcgtgtaggtctcttttgacgtctcaataacgaatgtgtttttttgcgttttcgtcactttatgcaccatttcaaacgcattaacacggatgtttttccgtttaacgacttcccggtaatacgataaagcctggattctgacaggcttcctgttctctgtaataaatgccacatctccgatttcgagcttttcacttgagctgaaaaaggtttgatgcgtcggataattgtaaatactgttaacgacattgcctttttcaatgacgagggcatcaatgccaatttgttttaggtgtatggcagcagatagtccacaaggtcctccgcctataataattgctttttcttgaatcatttctgtcaactcctgcgattggcatttcacttcatattttctatttccgaataaaaaaatctcctattttatcataggagattttttatttttatgcaaatcatcaacttatatccagcctctaaaacgcgaagcttcagccattttgcgaacgccgaccatatatgcagcgagcctcatgtcaattcttcggttgttagccatttcgtaaatattgttaaatgatttgaccatcattttttctaatttttcttctacctcttcttcactccagtagaagccttggttattctgaacccattcaaaataagaaactgttacgccaccggcacttgccagcacgtctggtacaagcagaatgtcccggtctgaaagaatttttgttccttcaagcgttgttggtccattcgctgcttcaacgacaattttagcccggatattatgggcattttcttctgtaatttgattttcaatcgcagcaggaacgagaatatcacaatccagctccagcagctcttggttggtaatggtatcgttgaaaagctttgttacagtaccgaagctgtcgcgtcggtcgagtaaataatcgatatcaaggccttccggatcataaagtccgccatacgcatctgagatgccgacaacttttgcccccgcatcatgcataaattttgccaaatagcttcccgcgtttccgaagccttggacaacgacacgcgcacctttaatatcgatgcctctcttcttagccgcttctttaatacagatggtaacaccttttgctgtcgcagattctctcccgtgagatccgccaagcacaagcggtttgcctgtaataaatccaggcgaattaaattcatcaattcttgaatactcatccatcatccaagccatgatttgtgagtttgtaaatacatccggtgccggcacgtcttttgtcgggccgacaatttggctgattgctctgacataccctctgctcagacgctccagctctctaaacgacatatcccttggatcacaaacaattccgcctttaccaccgccatatggaagatcaattatgccgcattttaaactcatccaaattgaaagcgccttcacctctttttctgttacgttcgggtgaaaacgtatcccgcctttcgttggaccgacagagtcattgtgctgcgcacgatatcctgtgaaaatctttactgaaccgtcgtccatacgaacaggtatttttaccgttaataatctcatcggctcttttaacaattcgtatacctcttcgggatatcccaatttttccagagccttatgtattacggtttgggttgattttaatacatcaagtttgtcctcttctgtatgaccggtgtttcgatcggctgccatttgagttaacctcctagaatcttctgtttctcacatgctccctttcagagaatagtatacaccttcatatgatctgtgcatagaataaacgttatgtttttccatgttttttaacgaaaaaaaactgctgaaatcagcagttttccgttgcattcttatgaaaaatgagtttgtatcgtctctacggcattaccgtccataatgagcttaccatactcttgcaggcgataaatcgttaaagttgtcggattgccgtattcagccagaaccgccacaaccccttcagccgtatgtgaccctagatcttcaaggcttaaaaagtactgcccgtcatagtggtagacagttccccctgtgataccgattcgctgtaagctttctgaaagctgaatgatatcttcaaaggaatggaattgatatatgatgtccgcgctttcatcaagcttgacttgcatttcgatgtaatcatcatcatactcatcgtcttctgaatcggcgtcttggttctttgttacaatcacgaccatcccttgtgcttggagagaatacacttccactgcaatcggtccattcgcttcaaagccgagctctgtatttgcttcattcatcatatctttaaataactggtggactttgaatgagtccttccagaggtcttcttttgtcaatccccggtctgtcaaatcatcgagggttaaaaagattttgatcttattataattcagacgctcaagccgcataacgttccctcctgcctctacttgcacacaaatcatataacacattatatgagatgatgagtcataggttcttaattgttatcagtttacactgagttcactagtaagacaagcacaatgcagtttttattgccatatggatttttgctttttagaagttattctggcccgcaaagagtcacaatgtgtgtttcaggctcagcacctaaacgaagaggcacttttgtcgtgccgtagccgttgctgatcagatatgccgcgtttttaacaatacctgttttccccagttcataaggaccgaattttccaaacctgatctggcctccatgggtatgtccgctgagtatcacatcaataccgtcatcttcattgatttgttcatgaatctccggattatggcaaaccagaatattcagctggctttcatcaagttctttgatggcttcttcataatgatccatctccatcctgatatcatcaacccccgcaatcgcaatcgtatgcccattgtatgaaaacgggactgactcatttctcagagtgatgacgccgtgcgctttaaatatggaatacagcttatgctgcctgacttcataatcattattcccccacacaaacacgatagggaccccgaaatgtacgagccttttgatgttttcctcgattctcgcactgggcaccccgccctcagctaaatcaccgccgattataaccaagtggggggcatggcttcgcgctttttctaaaaggtcttgatcgatgagacgtttgtgaatgtctgaaataaaaaagattgtcagaggcggcttgcccttcatctttgataaaggaaacgtatgtgtcttcaaatgattgccttttgctgttgcatacatttttgccgtcattgccgctgccgcaacagttagtacaccggcaattttcactgatagcttcataaaaaaactctccattctttttagaacttatcaataagacggacaataaaaaaaagacgtttctatcgtttgagaaaacgccccattttatttactttcaaaatatagattaatgtcatatttgtgcttcatcatatgaaaaacagactctctcgccttccatttatcgggctgcggccagagatcagtgcttttctgaataatttcacatctcagtttatggaaatcagtctcggatttttcttcctttttcttgaaataatatgaagtacagtaggcaaaagcggttgccagcatccaaaataaataaaaggtatggctaagtatttcttgaagtataagctgaggctccgggcttttgatcatgatcataacacataataagcctaggcagataagtgaagcccatcgccatctgcggcattgtgctgcataattttcgaatttttgttttcgttttaccagcgcttggagcatctgtttggtcggcgcgtctgtaaactgatccagctgattccataaggattccatacgcttcacaccttgtccattttcattgctacaatatatgaacgtaaaataaaaataataccctattcatccattaaggggatgtccaaaacttgtccggtgtaaacatcatttccattcagatgattatacgctcgaattttttcttctcctgtccggcttttataatacttcatggaaatgcggtatagcgtttctttcttttggacggtgtgcttgacaacgcgattcggcacattttgaactggctcagctggctgttcttgctgttgtactgttgattgggaagaggaagcagccgcggcggttgcttcctccttatttgccgagtcttctttatccgctacagcagtctgtttcttatcagcagctgtttttgccggctcttttggcttggaatcttcaggctcttgttttgactccttctgcagtgcggtttctttagtgtctgcggtatcgtttttatcctctgatttcgggacaacctcatatttgctttggctgctgtcaataaaaacatcttcataatcgtcatgattatccgggtggctctttagataaaataaggtgactaaaacgataaccggcacaaatacaaatattactgcgagtactgtgaataatggcgtttttgttttgccttgcttttttttctgttctctttgattttttacagattgtcttgtcggaaggctttctccatcatcgacataatcgtccgccaatgcggcgttttgatcttcataaagattctgggcttttcttctctctactctcgacatgttcgtcatgtttatccctcctcacatgttcaaaacgaatctgacaggcaaacacggcatcaatgataaaatgcgccgtcatcggaacaaataagttgccggtccattcatacatcagaccgagcaaaaagctgattgctgtcaccataataaataacagccattttgacaaataccgaaagtgcagagcggcaaatataaggctggccgcccataaaccgatatgagtctgcagcactcctctgaataacatttcttccgcgaaagcaatcagaagcgttaaaaatataatatgagggattgacctcttactgaatatttttttattgattccgccgtcatcatataaatgagacggaaaccatttcattactgccatatcggctaaaataacaataacagctatagaaacaccataccagatgattcgcatatcgcgaatgtcccagagctttaatacgtcccgtacatcctcaaaaaagaacagtcctgctgcagcagcggcaaagatgatgagtagctgcgtcaaatataactgcttcagcatatcacggtcagacatatgctgaatataatctttttgctgtttcagttcagctcacctacagtctgcaagctgaatatccggtgcaattccgaactccagctgtctaatggcgccattttactccgttcccctttttgttcatacaaggataaatcaaaaccgcaatgtgaacagcacgggaggtttccgtcatcaggctcgtatgattcatcaaagtaggttaatagtgcctgccttaaacagccatcacgctgaagcaaaaatgatacacggtgcattttttccagcttcagctccatgcgatatgaaatttctttcttcatcagttcaactgatgttttcccctgcataaagagatgaatcatcatacgggcctgtgtctctccgacgccatactgaagtaatacgtcacgaagccttctctcatcccgctcctccgtcttctctagcacacggatcacgtcggcgatttcttcagctgtgacactctccatctggataatctgttcctgcaattcaaaatcccctggcgcccgcagcaaaatgctgacactcggctttccgtcgcggcccgctctgccgatttcctgcataaaagcttctgccgtctgcgggaggtgaaaatgaatcacatatctgatatcgggtttatcgacacccattccaaacgcattcgtacaacatatcacatcaagctggttatgaataaactgctgctgaattaaaatccggtcccctgactccaaaccgccatggtaaaagtcggctctgctgctcgttttgctattaatttcacccgctaattcctcggcccatttccgtgtcggacaataaacaattcccgggccttgcagattttcaaccagctgaatgaccctatctattttttcggcagtatccgccgcattttcaaccctcagtgcgatgtttgggcggttgactgagttgagatggcgtacagcatgctgcagctccagcaggttcatgacatcttgcagcgtttcctttgtagccgtggcggtcaatgccagaacgggcgggtgaccaagtttttttctcagctgcccgagctttgaataatcaggcctgaagtcgtgtccccattcagaaatacaatgcgcttcgtcaataacaaataggctgatcgggacgcttttcaatttttccaatacatatggagactgtaaagcttcaggagacaagtacaaaaatttatatcgatgaatatgttctaaaacaaattgtctttcctgcctgttaagcatgctgttcaaagctgcagcacgcttttccccccgggctttgagctgctgcacctgatcctccattaaagaaagcagtggagaaacgattaataccatgccgtcaagcatataaccaggcagctggtagcaaagcgatttccctcccccagtcgggagcattgcaatggtatccttcccgctgagtatgctttcaataatgtcctgctgcccttttttaaaggaagtaaaaccaaaaaactgatataacgtttgctgtaatttagtcatattgctgcacctgctttgtcaatgccagtctgatttgaaagtagctgaaccgctgttccagcccgtcgcgaatttgtttgattttattcgtccgcatccgtttggcaaactctgcgatttgaagctggtcttctgctgatacatagtcattaatcataaacgcaggctcatggagagaaatctcgacaatgtggtcttcaatcgtcgctgttttcagctttctgatttcagcaattcgctgtatcggaaacccttgtttgaccatctgccatgttttcctcgtcgactctgtcagggcattatctaagtgcacatcagaaaggagatcctttaacaaagcatcttcacactccggaagagaatgaataaaataatgtaccgaagcccaaaacatgatatagacataccattcgtcttctttcagcgtatcagcaagctgcctgctcgtataaccgatccgatggtgcgaggttaaggagtagacaaaaatttgcgctgctttgttttcaatctttttcaaatgcgcctcaagcatggcaaaaaggctttttgccatctctatatgatccgtatgccgggacaggtatttctttacccagtgaagtgtcttatgatcctttgtgacagggatatactgcctgctcccttgctgtttatgggataggacctgcacaagcagcgaaagccttttccaaagcacgccggcagcctgctgataatgagcgccgtgacaatgaacgggccaaggccgctcgctaagggcatgtctcaaaactgctgcgccgctggctgtcactttgtatgtatctgattcagacattggcgcgagatatgaatgcttttcaagcttgtcaagcgacgcagaaatatcgcttctcgaacattttgccgccattccaaagtattttgcagtctgaaataagccggcatcttgaatggtctgtgacgatctcttgcctttgaataggtgaaaaacagcgcttcccgaccgttccccgtttattttgcaaagacaatcgagaaccataatatcgaagtaatttaatgacaacctatccacctacattcttcctgacaaaaatcgttgatttgctctttttattttaacagatttcaaacagaaatcgacgtttaaagtcatcattaagggggatgttatgtagataaccccttatgtgataagcattctcaatcatttttctgttgaaatgtggcagcaacatcattacaataagtaagaggaataggtgttaaattgattaaatataaagattgatccatttgttccaccaagaacaatctgggaggttttattcatggcaaagtacacaatcgtagacaaagatacatgtattgcatgcggcgcttgcggagctgctgcaccagacatttacgattacgatgatgaaggcatcgcgttcgtaacgcttgatgaaaacaaaggtgttgtcgaagttcctgaggtactggaagaagatatgattgacgcatttgaaggatgccctactgattccatcaaagtggcggatgagccatttgaaggcgacccgcttaaatttgaatagaagtaactaaaaaaagctcccgaacgggagctttttttagttaatggatatgtgcacttcgctgctgctcaatccatggcttaagcttgataaaaattagtgagaatacaaccgtaattacaataccttttatcatgttaaacggcaggatacctgcgacgactgctgtttttagcgcgctgtcggataatgccggtgaatgtaaaaaccatgtgtatgccggaagaattagaacataatttaaaatactcattaaaatggtcatcgctgcagttcccaaaagcaggctgacagccaagccctttgctgagttgagttttttaaataagaaagcagtcggtaatataaagagtgttcctgcaataaaattcgcaatttgccctacaggaactccggccatgcttccctgaatgatatactgaagaacattttttatcgcttctacggcaatacccgccaaaggtccgtaaatcagaatggcaataatagcgggaacgtcgctaaaatcgatttttaaataatccggaagacccggaaacgggaaatttaacagcatcaaaacaaatgcaatgctgctcagcatgctgaccacaactaatttttttactttcacttcattctctccttttcgatcacatcttactcgaaaacggaaaggttcttttccagccaataaaaaaaccgcttcatatataaaagcggggtttcgaaaattaggctaggcaaagaaacgtttgaaaaattcaatttcaaaacgcttatgaacctccatcttctcccatccagactgtactgtcggctccggaatctcaccgaatcctgctgtaaagacagctcgcgggcttagagccattggctcatcaccgccggtagggaatttcaccctgccccgaagattgatcatatgaaatttaattacattataaacgataactggttggctgtatagagaattgcttcaaattaaatatattacctgcaagctatcagatcattgatttattaggctttacttttatcctttactgcgtcaatacacgttgacactcttttgagaatatgttaaattatcagatatttagtttgtcaatttaggaggaaatctaacgatgtttcgagtattggtctcagacaaaatgagcaacgacggtttacagccacttattgaatcagactttattgaaatcgttcaaaaaaacgtagcagatgcagaagatgaattacatacttttgatgctcttttggtgcgaagcgcgacaaaagtaacagaagaccttttcaacaaaatgacttctttaaaaattgtcggaagagccggtgtcggtgtcgataatatcgatattgatgaggctacgaaacacggggtaatcgtgatcaatgctccgaacggcaacaccatttcgacagctgagcatacatttgcaatgatctcttctttaatgagacacattccgcaggctaatatctcagtgaaatccagagagtggaaccgcacagcttatgtcggttcagagctttatgggaaaacgcttggtattgtaggattaggccgaatcggaagtgaaattgcacagcgtgcgagagcgttcggtatgactgtgcacgtttttgatcctttcttaacggaagaaagagcgaaaaaaatcggcgtaaacagccgtacatttgaagaagtgcttgaaagtgcggatatcattaccgttcacacgcctttaacaaaagaaacaaaaggcttattgaataaagaaacgattgcaaaaacgaaaaaaggcgttcgcttaattaactgtgcgcgaggcggaattatcgatgaagcagcacttctcgaagctttggaaaacgggcatgttgcgggagcagcgcttgacgttttcgaagtcgaaccgccagttgacaacaaacttgttgatcatccattagtcattgccactcctcacttgggagcatcaacgaaagaagcacagctcaatgtcgctgcccaagtgtcagaagaagttctgcagttcgcaaaaggcctgcctgtcatgtcagctatcaacctgcctgccatgacaaaagatgaatttgctaaaattaagccttaccatcaaattgcaggaaaaattggcagccttgtatcacagtgcatgaaagaaccagtacaggatgttgccattcaatatgaaggcacaattgctaaacttgaaacatcgttcattacaaaagcccttctgtcaggctttttaaaaccgcgcgtagactctactgttaatgaggtcaatgccgggggtgtcgcaaaagaacgcggcatcagcttcagtgaaaaaatttcctcttctgaatctggatacgataactgcatcagcgtaaaagtgacaggagaccgcagcacctttactgtaacggctacgtatattcctcatttcggagaacgaattgtcgagatcaatggatttaatattgatttttatccgacaggtcacttggtgtatatccagcatcaagatacaacaggtgtcatcggccgagtaggacgtattctcggagataatgatattaacattgcaactatgcaggttggccgtaaggaaaaaggcggagaagccatcatgatgctttcctttgacagacatctggaagataaaattgtgaaagaactaacaaatgtccctgatattgtgtctgtgaagctcattgatctgccctaatcaaaaaaactcaagctatctatatagcttgagtttttttatttctatccccgtgtgtttttatgcaaaatatctaagacactccttagctcagaaacaggaatttggcctggtgcggacgcctcttctccagctccaaaagtacaagccgatccaaaaacctcaccgctcagcctgctgatgagccctgttgcagccattgacattgtaataatggggcggtctgcatattttgttttcattgtatacgtcgcatcaagcagtgttaggagatctccagtatcattcggcatgacagccatttttggaatatgcgcgcctaagtcctgcatttttcgaagtctggaaataatttcatcttttacaggtgttttttcaaagtcgtgatttgacatcaccacatagacgttgttttcttccgccagcgatactaacgcctttacatttgcatctcctgaaaataattcgatgtctatcagatcgatgtcttttgtttggattgccgattctagcaaagcaagataggaactttcgtccatctccatgctcccgccctctttgtgggttctgaatgtaaatagaaatagcttgtcttctaaagatttacgaagcttagaaatgagctttgtgaccgcttctctgtcattcgctttttcaaatacgtcgactctccattcaacaatgtccggattcagtaattttactgcctctgcttcattcagaatttgtttttccgtctttcccatcagcggaacgatgattttcggcattccttccccgatggaaactcctttaattgttaacacgttcactcatctcaaatcctttcaatcgttaccttgttttattatacacgtacaacttttttttgaaaatttctattatatgaatagcaactaaaaaagagcctcaaagggcccattttagtttaagaaaatcggatttggagcagccggtaccggaattgcatctgatacgtcatatttgccgattttgtttgttctggtttcggtaaaggtcacttctgtgaagccaaactcttttgcggttaaaagaagtccctcaatcattaaaatactggcaatagaatcctcaacttctgagtcctttgagaaacggatatataagtgcttctgtttcttcgttacagattggacagtacccgcttgaataagcggtgttgtatctttttgactgctcgattccatttccttaatcgcttcttttactgtatcaaaagaatgatttgacggaacgagaaagtcttgtccttgtttattttggtacaagtagtaggatcgttttgactgtttgggaatcgaaatttccgtaaaagtgccatatgagccaatccgaaccccagtctcattttgatccgataaaaatttgactttttcataaggactccattttaaggattctttaagcaatttttttaacagtgtatcatcttttacagaaaatgccgtagctggctgatggactcgtatacttaattccttctgctttggtttttcttttatttctacttcatctatgaaggatggaattgtaatggcatgatccaagatatccaattcactacttacagtcagcatgtcctggatcgtttggtatgcatttgttttttgaatgctgacgggtataattgcagatgtatcggcatcagcaactgctacagtgatgtaattgtcttgttccttttcaggtacaacaaacgatgtatgatccagggatgatgcagcttttgggctgtcttctgtctcagttttcgttactgcgttctcttgggacgcttctttttgttgaggctgtgcctgatcaaagaaatgaggagaaataatgaaggcgatataaaccgcaattgcagcggcacacgcggggccaatccacctgacagcgggcttatttttacgctttgccatcgtcagccgcttgtaaatatcctgaggcgaacgatggtctttaactgccggaagttgacttaacaactcctttatctgttcttcgttccattctgacttcatcatccattagctcctccctcaaaagctccatatgtttccgaagtactttgagccctctgtgttgggtcgtttttactttgctttccgagaagcgcagagccttggctgtttcctgtattgaatatccctgaataaaccgcaagataatcacagctctttgatcgattgtacattgatcaagcgcagcataaatttcccggacattttcatgttgaacggcaagttcgtccggtagcaattgctgatccctgacatcctgtgtatcccagtcaaatgtaccgagtatacgctgtctgattgtttgctgtttacggaaccagtctatcgcaacatggcgtgcgatagacaatagccatgttttttcactgcttcttccttcaaacgtatgataagaatttaatacccggatataaacctcttgaagaaggtcttctgtctggtttttatcctttaccatataaaataaaaattggtacaaatcttgatgatatgtatcatataataattgaaaggtttcttccatttgaaacccctccgttcacttttttgtcgtatgaatagcttgaaaagttacattacaactatattacgagtaactggaatttggaagggaatttatattaacatatccttaaattttattaatgttggctattaaaaaaacacccgctcagtcagcgggtgtttcttatggaacaagattcttcggcaaattcagactcgattttaccgttttgtcggaatataaaaagtaaatgttgttcctttatctattcggctgtgcacagtgattgatccgttgtgggcttccacgatatttttaacgatagccagccctaacccggttcctgctctgccccttgtccgcgctttatctgccttataaaaccgctcaaagataaatggcagatcttcttccggtatgccggacccggagtctttgatatcaattttcaatccatccttcacagaatggactgaaatggagacactgccgccggctgaagtatgccgcagcgcgttatcaatcaaattggtaaatacctgctccatcttgtcttcatcaaacataaattcctcttctgtgagagaaatgtcatgatctaaagcaatatttttttctttcgcaacaccggaaaacttccggatgatcttttctaaaaactcattcacattgattttttcataatgtaagcctgtatggcctgattccattcgggctaaatcaagcaaatcattaactaaacggcccattcggagtgattcgtcataaatgatttgggcaatttctttccggtcttcttcagagcttgcaatgtcatcaacaattgcttcactgtatccctgaagcatggagatcggtgttctcagctcatgactgacatttgcgataaagtcctcccgcagcttatcaaggcggcgttcttctgtcatgtcacgcagtacggcaactgctcctctgacgtgcgattccgcataaagcggcgacatcaaaagcacccatgatctgccttgcagcgtcatctcaatcatttgttctttttcagtgctgacagcgttttgaaacagctcttttgcttcaggcggaaggttgtcgccttctttgatattcatgttctgttcataataccaagcctgaagaaaacgttcagccggcgggttggtcacaagaatcgtaccgtcaatattaatggtaataaccccgtcagccatactgctcaaaatgttagaaagctgctctttttcttgattgagcgcattgatatgaaagttaagctgccggcccatttgattaaaagcggtcgccagttcaccgatttcatcctgagttaaaatcgggatttttgtatcgaacttgcccttcgccaaatcctgcgcgccttctctcatttttcggagagggtacgtgaccctgcttgataaaaagaatgcgaaaaatgtggtcagcacaatcgcaattccagcggcaagaaaaatatagcgggtcgtatgttttgttgtatctttaacggcaagcaaagactgggataaaaagaccatgcctttctttccgtctttttcatacgggacacctacaatcaggcgttcattatccgtgtctgtatcgctcagtcccgtccgtttgcttacttttttatggtctttgagagctttatttaagtctttgtcatgctgtatttgctcaaccgtaatagacgacaggcgatttttatcattcggagaataccagtggttcttctcatcctggatgatggcaatgcttgttaagttatcagcgagttcccaagtgattgaccttgccagtgcctggtcctcgtgattttctaggatgacagcaactttattcgcaagctgtgttaaatcattctcagcttcttccacatggtagttttcaataaactccagcaaaagaaccgttaaaatgaacaatacgatcaagacgagtgaaaggatcgtaaaccacagcttgcctactacgcttttccaaaatttcattcagcgccgacctcaaatttataacctacaccccatactgtgacaatttttttcgcagcttccggagataccttgttcagcttctctctcaagcgtttgacgtgagtgtccactgtccgtaaatcaccaaaaaactcatattgccacacttctttcagaagcttttcccgatcatacaccttgtcaggcgttttcgctaagaaatatagaagctcatactcttttggcgtcaggctcacttctgttccatcagctgttacgcggtgagcatcatggtctattgacagatgtgaaaacacgagcacatttttcgtcggtgtattggcattgaaataagaggtttgggatgctcttctcaaaagggcctttacacgcagcacgacttctctcgggctgaacggcttaacaatataatcatctgttcccgcttcaaacccctgcacccggtttgcttcttctccttttgcggtcagcatgataatgggtgtcgcttttttttcacgaatttgccggcacacttcaattccatcagtccccggcatcatcagatcaagcaaaattaagtcataattggcttcaagccctttggcaatggcttcatcaccattttcagcttcatctatagcataattttcacgttcaagatacattcttaaaaggcggcgaattctggcttcgtcatcaactactaatatttttgtttcgttcgtttggtccatgttttccccctgctttccttctgttactttcattttatcaaatcgtgagaaagtttgagaactgtgtcgctttcaaaggactatgcataagaatgaagtccggcaagcacaagatttacgaatattaaattaaacataataatagcaaaaccgattacggccagccatgctgacttctcaccgtgccagcctcttgacagtcttaagtgcaagtaagcggcatagaacaaaaacgtgatcagcgcccatacttccttagggtcccagccccaaaatctggtccaggcgagctgagcccaaatcattgcaaagatcagcgcgccgagtgtaaagatcggaaatccgattgatacggccctgtacccaacctcatccaccagatcaagattgacgtttttcaccagcggatgtaatagagcgctgattctttttctgatgatcagacggagagccccatacaacacaagacctgctccaaatgaccaaatgacagtgttcacttttctgcctgagaaaagcgcgggaagatcaacaagcggttccattcttccttcggtcaaaagctctccctgatgcggaccgacaagcgcgggcatttcgtacaccatcacgtttttttctttacttttgtccacccagttaaactccgcttcatagcctgcaagacgaaatgctgatgtgattgcaataaaggcgacggttgtgaccaggataaacataatcgcttcaagccagaaggtctttttgcttggctttgtctggtctacatgcttcaaaagaaagatgacaccagcgacaaagctgatggcaagtatagcttgcccaagcgcggccgttgttacgtgaatatacagccagttactttggagcgaaggaattaaaggcgagatatctgtcggaaacatgctggcgtaggcaatcagcaataaagcaattgacagcgtaaacaggcctaatgaaggcaatctatagagaaaataaagaatgataaacgccaaaacaagcatcatgccaaaagcggtggtgaattcaaacatattgctgaccggcgcatggccgctggcagcccaccttgtgatgaaatatccaaggtggcagaaaaaaccgacaatagaaagggtgattccaatgttggcccatcggtttggcctgccctttttatctttattcccgcgtatggccccgccgaagattgggacagcgattaaatacacaagaaaggccgcataaagaaaatttccgctcagctctgccatgacatcactcccttttcgcctatttctgtgttttgattaattctttttggtccaccggttcagtcagtccggaatcagccaatataaatgctaaatccttcttcaggccaaaccagtttttattggtatgccccgctaccataactgcaccgtcctgtgagtgcagccaaattcttcgatgctgccagtacataccttgaataacaccgatcataaaaatggctccgccgacagcaagcacccagagtgtcagatcctttctgactgtaagtccagtaatgtttttcgtttcgacatggtcaaatttcagcttgtatttattattgcctgatccttcgatggtttcttggatggcgacaaagctcttttcgcctttcggtttgtccggcgttatgatattaaagacaaaagccggattgttagggatctttgtttttgtgctcggctctccgtcctgattaaagtagaagtctggcaggtagctggcgatttccaccttgtaaccgttgccaagatcatagaccgaatctggatccagaaggttgatcttcaggctcccaaaggatttttttgtttttttatcaatcagctggaacaccatttggtcaagctgattctctttgtaatccacctggtaaacggaaaaagaatcaaaacgcagcggctgattgacacggatgtcttcttctgttacttttttcagcttcggcttctcgccataaacaattttcccttctctcttgtagagtacggcatcggtttgaaagttctttgccactctaccgtccccgactctgtcaatggcatctgcaaatacctttttttccgttttgctgttataggtctctacgctgaattgattgtttttcaaataatatttcccgtctgtacccggaattgctgcggtttcgccttctctgacccaaagcgtctcatcgacatacatgccaggcacaaatctcagcatcgcaccaaccagaaagatgattaatccaatgtggttgacatacgggccccagcgggaaaagcgtcctttttcagcaagaatgctgccctctttttctctgattctataatgttttttctttaatagagcaactatcttttctttcgattccccgttcagtacagtaaccgtttcactgaacaagcgctgcctttttaaaaaagccgggctccttctgacgccttggttttttaacgctctgtacaacggaatgacccgatcaaggctgcaaatcacgagtgaaatgccgatcgaggcaatgagcagcaaataccaccaagaaccatataaatgatgaaaccctagcaaataataaagctggccgaacgtgccatactgctccttgtaataagtatcagcctgtgcgcccggaggcagataggcttcctggggaaaaatggtgccgaacgctgatgcggcaagggttatgacgataagccatattcccaccttaaccgaggaaaagaaattccaaattttgtcgataatcgttttgttataggtttgcgaacgtcttgcgcttccgtcatatctcatatcagcgagcggaggttgagtttcctgaagagctcttccgcacgattcgcataaaacggttccaaccgggtttatatgtccgcattcacatttgacttgcttcatcccgaagtctctccaggttttatgagattcatatattcgtgtatcatgctttctgtcatagtgccggtcaccaccttgacaacttttccttccggattgatcaaaaaggttgtcggaagcggagatacgtcataggcatcaagcacttggcgatctgtatccagaacaaccgggaaattgactccgtaggatttcataaaattatgtactgctatctttgactccccaacatttacagcgacaatttcaacaccttggcttttaaaatgcttatattggtttgccatataaggaaactcttttttgcacggttcacaccatgtaccccagaaattcaaaaaaacacctttcccttttaagtcactgagctcgatacgtttcccattcgtatcctcaaggacaaaattcggtgcgtcggacccttcggatatactctctttgccggcaaatacagcgttgtaaatggtatagccgagtgcgcagattaaaacgagaaggatgccggtccgaatgaataaacgcctttttttcttcattgtccactgcccccttccccctattgcagatccattcaattatatcattgcacgttcatttcacatttcttactttttgaaggttatgtgaaatttagaaagcgtttttaccgtgatccgccagtgctctgagcctttttacttcgtgaggcgtaagctctctggcatcgcccgtgtgcaggcctcgcaggtttaaaaacgcgtattcctcacgcttcagcttgattacctcatgtccgatcgcttcaaacatgcggcgcacctgtctgttgcgtccctcatggatcgtcagctgaataatgcttgtctgctttttcttatccaaagacagcagcttcgctttagcaggcgctgttttgccttcctccagcctaattccgcgctccaactttctgagcagctctttaggcgggattcctttcaccttcgccacgtatgttttgtctatttcatacttaggatgcattagcttattggcgaattcgccgtcattggttaaaagcaaaagaccgctcgtatcatagtccagacgcccaatcggataaatgcgctgcggaatatttttaaaaaagtccgtcaccactttgcgtcctttatcatcttgcgctgcggaaataacgcctcttggtttatataagagaaagtaaaccggctcttcgcgttcaacctttaacccgtttacctcaatctgatcagaaccggtgaccttaacacctagctctgttactactttgccattcacctttacttttccttctttaatcagctcttctgcctttctgcgcgacgcaactccggcatgagcaatcactttttgcagtctttccatgtctttcacctcaagtattatcttacttttttcaaccttaacaaacaagctttttcaaattcctatgccaaatctaaaaaaaacgccgttttcaggcgctcccaaataataacgtaacgatgatgatagatgcaactacgccgattaaatctgcaagaagtcccacctttaatgcatcacccatttttttaatgccgactgctccgaaatacacagtcagtacgtaaagcgttgtatctgtagatccctgcatgacggaagccagcctgccgataaaggaatcgggcccgtatactgcaattaaatcggtcgtcattccaagtgcggccgtaccggagatcgggcggatcagagcaagcggcactacttcagcagggatgccgatagcggagaaagccggttttaaaagatccattataaaatcaagcgcgcctgatgatctgaaaacagttatagcgacaagcattccgactaaataggggataatggaaaaggcaatttctatcccctctttcccgccttcgacaaacgattcatatgtgggaacctttttgatcgttccataaagaagaattccggcaataatgattggaatcatggctaaagacagccagttgatgatttccatccgctcaccttcccttctttttgcggcggtaataaaaataccgatcaatgataatggcaccgattccggaaataagcgttgccaaaatgcttggcccgacgatatctgtcggcgttttggaggaataagccattcggacagcgatcaccgttgtcgggatgagtgtgatgcaggacgtattaacagctaaaaaagtaatcatcgaccggcttgcttccgatcggtttccgttcagctttttcatttgttccattgctttaatgccaagcggagttgctgcatttccgaggccgaagaaattcgccataagattagataaaatatagcccatcgccgggtgatccggcggtatatcagggaacagtttagatataaaaggtctgcacatccggctgaaaatatccaaaagccctgactgctcggcgattttcattaagccaagccagaaaacaagcacgctcatcaatccaaatgagatcgtaatcgcttctttcgcacccttaaacacggcttcatttacatcttgcagagttccgttgcacatcgcaaaaacgagtccgatcacggttaaactgacccaaattatattgaccattttgctccgcctgccgcattcagaaagattgatttaaacgtttcaaaaaattgtttcttcggtttttgatgccgctcattttcataatagatcggcacttttgcgatggttgcatcgttgaacatgatctccatgtgccctacgatgtcagggattttcgaggcatctttttcccatgcttttttcggcttgagcagtgtggtattaatttttacattttctttttcctcttcggtcagtaaataggtgatatcacgtttgataaaagccttcgattcataaaatgtgcctttcagctttggaatatcccctttttttgcaattaaataggtttgataatgctcaaacacatagttaaacatcttcatatggtcatcccaatcattagggtcattaatggtgacggctatcaggtcaatgccgtcctttgaagccgtagagaccagtgtccgttttgcaagttttgtatagcctgtttttcctcctgtgctgtacggataaagcatggtcagcagtttgtttttgtttttccatacgctttccatcgtttccgctttgtatatttttgtgcctgaaatcttttgatagtctttcagcttcatagcatacttagttaaaatggccatgtcataggctgttgaataatgattttcatggtcgtccaatccgtgcgggttttgaaaacgggtgtttttcataccaagctgctcggctttttgattcatcatataaacaaacccatcgaggctcccaccgacatgctcagcaatcgcgacagcggcatcgtttcctgatcttagcatcaggccatacacaagatctttcagcttcactttttgaccttctgttaaataaatggcggagccttctgttctgacagcatttgccgaaaccgtcactgtttgatccattttgccggattcgatggcgaggacggcggtcataatttttgtgatgctcgcgatccgccttttttgatgctcatccttggcatataacactctgcctgacgcaccgtcaataatgatcgcgctttttgcactgacatctatagcagcatgtgctgtattcacatttacggttgcaataagaaaagaaatcatgatcacgaatactgcttttttgaaaatgcgcatgtttgctcacgtccttgtggtggtttgtacaagtttatgcgcatgtccatcagttatgaataacaattatatttctggaagcaaacataaaaaaactctccctgaaaaagggagagtaaacgttatctgattggcgccatgcttgatccggacgcttcgtaatgagccagctcttccctcatcttcagaaaggccgcgctcaacggcaataataattgctcaagcgacgcaggaacagcatgataaaactcaattgcgctgaccccggtataagacgcccggctattttcacaccacgtgtcttttttcggcataaagaactcttcaatgcattggtgatacacattataaagtgttttttccgctctggcttcctgaaaaggctcctgcatcaggagacgacggcacgcttctgcgcctccttcacaaaatactgccattcttctcagagtgctaagcacatcacagcagtatcctttttcaataggcaattcagcctgtaaggactcaagcgtcgtttgatttaggtaatcgttcacggtattgacaaccattgataagaattcgcctgttttttgagtctgcgctcgcacaatcgaatgtcccatttcgtttggtatcttcccctcatgtctttgtctctcacattttgcttctttcatgatagcttcttccttatatcttatgatgatgaaaaagcgcgattcattaaacttctattttatatcttcgaaggtttggttaaagttttcaaaaaataaatctgcttcttcttgaagaacgtcttcttccgcattttcaggcagcggcggaagctcgtccagcgttttcaggccgaattgttcaagaaaagtcggcgtagtaccgtataaaatggcccgccccggaccatcggcacgccctacttcacacaatagcgccttcgcgacaagactgtgtaaaatccgctctgattttactcctctgatttcttcaatttctgctctcgtaattggctgtttgtatgaaacaatggccagtacttctaaagatgcttgagaaaggccctttgacggcacttcaatcagttttttcaagtaaggcgcaaagtcttttttggtagagagcatgtacgtatctgcatactcaataagttcaatccctcgtgtatctccgcggtattcgtccgccacatccgccatgatcgtgttcagttcaggctcttcgatttcaagcactgttaacagctgcttttttgtaagcccttcatcgcctgccgcataaagaagggcttccacaatagctttccaattcacgatatcaagccccatgaatggattcactccccgtaatgtaaatatctgaaaaattgtgctcctgttcaatgaggaccagctgatttttcatcagctcaagaacagctagaaaggtcactactaaatgttctttttgttcatatggaaacagatccataaagttgattctcgttcctctagatttcaagctgtgcacgatttcgttcattctggcttcgattggtatgtcctgtcttgtaattgttgtttccatcggcctgtttatttttttgcgtttcagcactttttgaaaagctccgatcatatcatagaccgtgacagagagcttttgctcagactgttttacttcttttgcatattcactcaaatcactcggcggtttcgtgaacgatttttgtctttcttcttcccgttcttttaaatccttcgccgcatctttatattttcgatactcaatcagcttttcaatcagttcctcccgcggatcttcttcttcaagtaattcatcttcaaaaagctcctcctcttgcttcgggagcagcattctgcttttaatgctgagcagcgtggcagccataaccaaatactcgctggccatatcgagctcaagcacacgcatcgtatgtacatataataaatattgttcagtgatcttcgccacaggtatatcatatatgtcaatttcaagacgattgattaaatgaagcagcaggtccaatgggccctcaaacgtatcaattttcacttgatattcttccatcatctcaccattttcaagtatcactctcattgccggaaaaactggctaccctatagtataagccaccaaaaagctctcgtccaatactatttcatttcctgttttgaacaagtttgtacagaatattcaaaacacgagaggtgtttgctcggagcgcagaagcgggagaaaaagccttagcttctggttttcctttctaagaagcaatagaggccgagcgttcttttttccttttatcccttctatggtacactaaaagcacattaaaggaggaagcaccttgtatccgaaagcttatatagattatctcgttgagtttcacgcgacacgggattattttgaatgccatgaaatattagaagaatattggaaggaagatccgccaaagaaacgaaaacgctattgggtgggctttattcagcttgcagttgctttatatcatcacagaaggcagaatacagccggggcaaaaagactgatggcgaacagcatccggattcttcaagcagaacaccgggcagtcgaagacttagggcttgatcatggccgtttgctcgaacttatgcaatcggtttacgaacaaatcgaaaccggctctgcctataaaagcattatgctgccaatcaaagatgagaaactggaggaagcatgcaggatcgaatgcaggaaaaaaaagtatacatgggggcagcccagtgcactcaggaacatatttcttatcgacaaacatcgtttgcgggatcggactgacgtcatccgtgaacgtgaaaaagaaatagaacgcagaaaaaaaagcagagactgatcacagcctctgctcagcgtgtcgacaaaccctcgcattcgttgtcaagcctgtgcgttggtgctcacgaatgaaaacattcgctccgctccaatgctcagctttcctagacttcaagggttttcaatcgcgctgaaaggatgacaaaaacctaaaacaaaactgttttcggattttgtcatcaaactaaagcagaggctgatgacagcctctgcttaattattgtatgaaatgtcttgatcctgctgaccttgacaacgttcgaaaaagctctgcgttaattcatttggaaccagtacttgcgttttgaataaatgctttaaagcatccatcatctgttttccgattccttgatggcgatgagaaggattcacactgatatgccggatctcaacctcagaatcctttttttcgactccgattgctccgacgatatcctcgtcctctttccaaagaaagagctggcggtctgtatccgtttcgtagtccttaattgtctgctgaagctgcttaaggtctttttcattcggcataaacgaaagaagccccatcgcaatcttttcaaacgattttttataacgaattaacataaaaacccctctatatccaaaatgtccagtctgctattaacggatacgaataggtgatccgttttctcacattatatcattttcgccatatttttaaactgttttcagcaaattattcaaatgagcggtttaaatttgccatttcaatggcagaaacagcacaatctacacctttgttgcccgcttttgtgccggcacgctcgatagcctgttcgatgttttcagttgttacaattccaaagatgacaggtacaccagtagtgtttgctgcttgcgcgatgccttttgcagcttcattgcagacataatcgtaatgtgtcgtcgcgcctctgatgacagtgcccaatgtgataatagcatcatatttttttgtttccgccatttttttcgcagcaaacggtatttcaaatgcgcctggaacccaagccacatcaatgtcatttgtgtctacaccatgtctgagcagcgcatcttctgctccgctcagcagcttgctcgtaataaaatcattaaatcttcctactacgattccgattttaagacctgtaccaactaaatttccttgtatgatattcatatgattcccatccttttttgtgatatttgtgattagaaatgaagtaaatgacctagcttgttcattttggtttgcaaatattttttattgtgttctttcgcctccatttgaatcggcactctttctgaaatacttagtccgtagccttcaaggcctgcgatttttcgcggattattcgtcaaaagcttcatattccggacaccgaggtcgcgtaaaatttgtgctccgatgccatagttgcgaagatccggcaagaatccaagcgcctcattggcttctacggtgtcataaccttgttcctgaagcttataagcttttaatttattgattaaaccgatgcctcgtccttcttggcgcaagtacagaagcactccacggccttctgcggcaatttggttcagcgcggcgtgcagctgcggtccgcagtcacagcgatgagacccaaacacgtcacctgtgagacattctgagtgcacccggaccaataccggttcttctccgaacggcacctctcccatcacaaatgcgacatgctcttttccatctacctcatttgtgtatccataaaccttaaatgtcccaaaatcagtaggcagcgtaatgtcaacttcacgctcgacaagtgttgtcagattgtaacggtattgaatcaaatccttaatggtgatcatttttaattgatgctttttcgcaatttcaatgagctcaggcactctcgccatcgttccgtcttcattcataatttcacaaatgacgccggctcctggagatccgcaggcttcagcaagatcaacagcagcttctgtatggcccgctcttttcaggacacctccttttttcgcaatcagcggaaaaatgtgccccggacgctgaaaatcagatggcacggatgtgctgtccagcaatgcttgaacggtaaaagatctttcttgagcgctgatacctgtcttcgtttcacgatggtctatacttacggtaaatgcagtgtggtgagaatctgtattatgctccaccatagggtgaagatcaagcctgtctgcgatttcctcactgagcggcgtgcagatcagtcctctcccatgtgtcgccataaagttaatgacttccggcgttgcatgctcggcaagagccacaaagtctccttcattttctctgtcttcatcatctacaacgatgatgacttcgcctttttttaaagcgtccagtgcttcttctatcggatgaaacatgcaaatcttcctctctaaaagccgttttcgcttaagaaggcttttgtaatggtttgttgggtcttattttcattggctttatgcaaaaatcgatacatatattttccgatcatatcgcattcgatattcactttagagccgatcgttttttctgaaaagatcgtttcgctgatcgtatgcggtattaaggagatcgtcactgtgtcttctgtcaggccgaatatggttaagctcacgccatccacagtaattgatccctttaaaaccaatgtttttgttaatgacgggtccatttttaaatcatagtaaactgcgttgcttttctcttcaattcgtgtgatttccgcagttccgtcgacatggcctgagacgaaatggcctccgaaacggccgtttgccgccattgctctttccagatttactttgcttccttttgttaaatcattcagtgacgtagctttgactgtttcaggcataacatccactgtgaattgattttttgtaaaatcagtgaccgtcagacaaatgccgttcactgcaatgctgtcgccaagatgaacatcctctaaaatctttgagcatttaattgttaaggccattgaatgccctgcttttttcatggattcgattgtgcctgtttcttcgataattcctgtaaacatggtcaccatcctattcctttgtcggttttgccgtcagtttgatatcacggccgatttgggttatatcagtaaattgtaataaggggacatctttcattgattgaaaaccttcaccggagattaagctgggagcatgcgttcctccgattagtttaggggcaaaatagaagatgatttcttgaaaacagccttctttgacaaagcttccgtgaacagctgaaccgccttccacatacaccgacatgatgccttcttccgctaggatcttcaaaacatcaggaatttgaatgcgctcggtttcaagtgtaaatatgttcactccgaaagctgaaagccgttttttcttttcctcgtctgcgcgtgccgtcgtaaaaatccatgtcggcgctatttgatcgcaaatcactttagcgtcctcaggaatcgagagtacggtatcaagtatgacccgaaccggctgttttgttacattcggcagtctgcaggttaagcttggattgtcggctttcactgtgccaactccgactaaaatgctttggtgtgttttcctgtattgctgagcatcctgtcttgcagcctctgacgtgatccatttgctgtcacccgtgctggtagctatcttgccgtcaaggctggcagccgcttttagcgtgacgtacggaaggcctgtcctcataaagtgcagaaatttttcattcaggctctccgcctggtctgccaggatgccttcccttacctcaatgccggcttctttcatcatgctgatccctcttccagccacaagcggattaggatctctcatcgccacgaacactcttttgatgccagagttgataatcaattctgcacatggcggtgttttcccgtaatggctgcacggttcgagtgtaacgtaaatgtcggcaccctctgcatgtgctccagccatatggatggcatgaacttctgcatgagcttccccatattttaaatgggcgcccattccgacaatttgtccgtcctttacgacaacagcgccgacgagcggattggattcggtctgtccttcgccctgcttcgcaagatctaaggccagcttcatataatactcttccatttgtttccctcccctcttttgttatttaccgtcaaaaaagccccgaatttataaaaaattcggggctttaggtattttacgcaataggaaataacactatgcatttttgaaccatttgcatagcggttcatcatccttctcccatccagactttcactgtcggcttcagcttaaactgaatccaccgcgtgcttatgcacacgggtcacgggctctaaagcaaatgtgctttactaccgccggtcgggatttccaccctgccccgaaggatacaatctttattcatttgtccttattggctattatagcgatcctttttaaagtacgcaatgaaataaacttacaatttgagaaaaacaaaacatcacccttcgatccgaaaggtgatgttttgttaatcattcacttttgcaaccttgattaatccgtcgatccgctttgatttgctgaagtatgccttaatcttgtcaccttcttttatatcagataaatcctgatttaatttttttccgttgaagatgattttcgttccgttttctgctactccatgatactctgagccgtcaattttcgtcactttatattcctggatggtgtattcctcttcttccgaggacaaggtttgtccaattgctgtcggaacatccttcagctcaacgtcatttatgtacatataaccgcctgcaagtaaaagcaaaagcactaacagaatggtaatcttggtttttattcttcccatttctaaacctccagccaatatgaatctattcattcatatgagttattcctttttttcatgaataaaaaaccgtaaattctcgtaaattattaatataacgatgcataacgggaatatgtttcacatttctgcaaaaatttcttttctatagatatacgaatttatgttctgttttaaggggatgaccgcaaaaaagatataaaaaagcagcctctcgggaagctgcttgatcctaatttgttttgcgcatttcgttaaacgggtagaaaacaaactttgacgtacccgcaatttgttttttcgtgaagaggccaaggccgttacggctgtccatggaattgcgacgattgtcacccatcacaaaatacttgttatcaggcactttaaccgggccgaaatcatcggtcaaatggtcaaaaccgtcctgtttcgctctctttttattagccgccaaataaggttcgtccacctttttcccgttgatatagagctggtcatttttcatctcaaccgtatcgccgggaaggccgataatacgtttgacatagtgaacatcatctccgtttaacacgacgatgtctcctctatcaaactcgccgatgtatttgactgtcatattaacaaaaaccctttcacggttgtgaagtgtaggatacatagagtcaccatcaacgacatacggcgcaaaaataaagttgcggatgagcaaagcaagaacgacagcaatcacaattgcttttgcccattctaatattgactttttcttcgaaacattttctgatttcaactgatttcctccaataaacaacggtcttcaatttatgttatcacgaatcgaaaaaaaatcccattaggaccattgaagtgattttacaaactgttaatcttcatcttctacccacatcatgcctattttttcttgtcgatcataactaggcctgaaaatattgaaagaaatgaatcgcataattcagaagcgatggactcagaagaaagagagttctcatatgcaaaatctttagatcgtatataaagcatgaggttacgggcagtttgttcatttactgcattccattgatctcccagtccatgatacccatggcacttgacaaaacaattaacgtcatgaaggttactggaatgtttgcggcaacctatttcacaggtgataaccgcaccccgttttttgctttcataatatgtttaaaatcattcaagctcgaaaacatggatcagcctccaaaaaataaatccaatatattcccggcagttgaagactctttattataaaactctgaatatccgcagttcttacagtaaaccactagaaatcggttatgctgcacgtcaaacagctttgataatcccgtgccggttgtggctatttctttttgtccggcttcagtactgccgcattttatacagcctttgttgtccataccgcgatctccttttcattacatcacgtttgtttgatttattttactacaaaataccaatcccaatgaaccgtactactttaaagtttgcttaattttgatcccccgttctttacatactaattgggttcgtttctcagcttggtaaatcttctggagaaacggaaaagctccatgaccaaaacatttaaacccagccaaacaccgccgaaggcgcaacccgcagcaacatcactcggatactgctcattaacgcgtacacacgatcagcccgatgaggaataaaacgataatcatcaaaaaacgcaacagtttgcagacgagccttgtgagaatgacgaacaaaaagataagcacaaaaaccaaaaatgacaaatgccgttaacgtctgttcgctcgggaatggatataatacatgactttccaaaggagcgtgaacaggatgaagggaatgaaagagccgtctaattccctctccataaagctctcgcaccaacgactaggaaaaataagaaagagagttcgattttccggtcttgccctttgaatactgtccaaagaaaagttagaacaataactgctaacagaacatctctagacgcaaaagctttctgaattgcagctgggcccagtctatacccgatccaatacgacatgctcactcccgcacagctccccaatccggccgctaacatgcttagcacccagtttaacttttcttgaaacacgagaacaccggcaaactctcctggtccaagtaaagatagaaactctaacatcaagacaataaacaagacggcatatccgtactgttcgagcaaccccgtcaaaacttgcatgtcattctccttaaacttttttgttcttttatcattcccaatccactttttgtataatcagcacaatttcaccttcagtcgtccaacaacattgtctatggcgggatcttctctcctatactcgtcactcatacattcttttttgacataggaggagcaatagcatgaaatgggaggaaacaaaagatacacagggagtttgccaaaattttgggcagttcgttctgccaccgagtcaggtgtttgtttgcctacctcattccttggccattccccattttccccgtttgaggttcgcaatgataaagtatttcacttagtttcgtacatgaagaggtaaattctttgctcaccgaactatgatagctgcgcatgatgattactgcattgcataaccactggttatttagtgagccgtgagcaatgtatatgcactttgagtcagcacaggatgatcctattacattcgccagaaaagcagctgccgcattcagagtagttaaaagaatagacagatagctgggcttccggaaggaggcgcttttttcgagcatttttataaatcaataaaaataggcatcttctaaatatttttgccgataagtttacgctaatcaactctagcactaatacatataaacaatagaatgatatgaaaggagacttaatagtatgattgattatcctattaatataaacaacgtttccgggaacagtgtaattaacgtaggcggcgcttttatgatcaggcctttaactttgtccaaatctgtgtttggctccggaggtttaaatacaggaattgtctttgaaaataactttgtaagcaaggctaaaatgattaatcatcaatttactgatcaaaacgtcaccaaaactttttaatctattcattacgggggcttgcgatgtctcactaactaaacacctggttttgccaaccgccatcagcactcggcggttttttattgaacatttttacccaataaaaaagctccctctatatgaggaagccttttgcctgccaattagccttctacgcgaacttctttcatgacatcgccgttagacatgtttttcgcgaattctaatccgcttgttactttaccgaatacagtgtgaacaccgttcaaatgaggctgtggctcatgaacgatgaaaaattggctgccgccagtgtcttttccggcatgtgccatagaaagtgcgcccgcctcatgtgtatgcgggtttccttctgtttcacatttgattgtgtatcccggaccgccagtaccagttccgtgcgggcagccgccttggctgacgaagccaggaatcactcggtggaatgtaagcccgtcataaaagccttcgttcgcaagcttttcaaagtttgcaacagttccaggtgcagcttcaggataaagttcaaattcgattttgttcccgtcttctaataaaaagtaacctgttttcaattgtatgcctactttctttattttaattttcaaaggagattatgtatgataggttatagcctgtctctccttgtcgcggctattataccacacctttcgggggaaaacgaatctcccgggctttactaaaaaataaaaatgaaacctgaatctctttatctccgtctaacctaacggaactgtatttttcatgattcaggtcctcacaaagcagcactatccagctgcttgtgaaattgaaggaggtcaaactgctttgaagaaaatttggattggaatgctggcagcggccgttttgctgctgacggttccgaaggtcagtctcgcggatgccgcagttggagatgtcattgtaacactgggtgctgatttgtcagaatccgacaaacaaaaagtgcttgatgaaatgaatgtccctgataatgccacaacggtaaccgtgaccaataaggaagaacatgaatatttaggaaaatatatatcgaacgcgcaaatcggatcgagagcgatttcttcatcgtcaatcaccattgccaaaaaaggctccggattgaatgttgagacccataatatcagcggcatcacagatgaaatgtacctgaatgcactgatgacagccggtgttaaagatgcgaaggtgtatgttacagcaccgtttgaagtatccgggactgcggctttaactggattgattaaggcgtatgaagtttcttcagacgaagcgatctcggaggatgttaaacaagtcgccaaccaagagcttgtcacgacatcagagcttggagacaaaatcggtaacgaaaatgcatcagccctgattgcaaaaatcaaagaagagtttgctaaaaacggggtgcctgataataaagctgacatcgaaaaacaagtggacgacgcagcttctgatttaaatgtcacgcttacagacagccaaaagaatcagcttgtctccctattcaataagatgaaaaatgctgacattgactggggacaggtcagtgaccagcttgataaagcgaaagataagattacgaaattcatagaatcagatgaaggcaaaaacttcatccagaaagtcattgatttcttcgtatctatctggaatgcgattgtatctatattcaaataggaaaagcgccgaaaaatcggcgctttcttttattgctttacacccgttttaaatggcagatcaagttttacaatatcttcgtatgtttctcgcttcacgactaaatgagcctcaccgttttcgacaaatacaacggcgggtctcggaatacggttataattgttggccatgctgtatccataagcgcctgtacaaaaaacggcaagaagatcgccttcttttacttccggcaggtcaatatcccaaatcagcatatctccgctttcacagcactttccggcaattgataccgttttgtcatgcgcttctccgatcctgttggctgccgcagcttcatatttagcttggtaaagcgcaggacgaatattgtcgttcatgcctccgtctacagccacatattggcggacacccggcacttctttttgagagccaatcgtataaagagttgtgcctgcgtctcctacgagagaacggcccggttcgatccaaatttccgggatgtcaaaaccgtaacgggaagcattttctttcacagcttcgataattttttcaacgtattcagtggcatgaagcggttcatcatcttccgtataacgaatgccgaaacctcctccaagattcagcaccttggatacaaatgaatatgaatctctccattcgtctagttttttgaagattttttccgctgctaacacaaaaccggccgtatcaaagatttgcgagccgatatggcaatggacacccagcagctgaatgtgttccgattgtaatacttgttcaatggcccgttcagtttgtccgttatgaagatcgaaaccaaactttgaatcttcctggcccgttgtaatgtagtcatgcgtatgcgcttctactccgggcgtgatccgaagaagaacatcgatggagtgacccgtttctttacataggtcttcaagaagcgcaatttcatagaaattatccaccacaatgcagccgatgcggtgctcaagcgccatgcgcagttcttccctgctcttattgtttccatgaaagtggatgcgttctgccggaaagcctgccgcaacagccgtatatagctctcctccggatacgacatctaaagaaagtccctcttcctcagcgagctgaatcattgcgactgatgagaatgctttgctcgcatatgccacctgtgctttcagccctgcagaaataaacgcctgtttaaagcttttagcacgctcacgtattaaagccacatcatatacgtaaagaggtgtaccatatttctccgctaaatagagagcatccacacctccgatttctaaatgaccatgttgattttgtctgcttgtgccgtgtaagaacaatgtcattccctctttctccgcttatggatgaaaggacagttttatggactgtcccttcataattaagacatacattatcatactcttcagtcagtttcaatgcgattatgaattggtaggctgtcttaagcgatttttggggtgaacgatactgggtcttacttttgcgccaggtttcgctgtgcggacaagaacctgccacagcgcctttccgttaaagggaatcagcggccataagtacggtgtctgaagggatttgatgcttgtcatggcaataattagcactgtaaatccgatgacgagcccttttatatgaaataaagcaacgagtatcatgaggacaagacggctcattttgtttgccaagcttaattcataactaggcgtcgtaaaggttccaatcgccgcaagtgagacgtacagaatcacctcaggagaaaaaaggccgacctcaatcgcaatctgcccgatcagaacagcggcaattaaacccattgctgtcgataaagccgtcggtgtgtgaatggcagccattctgagaaactcgattcctaagtcagctaaaaatatctgcaggatgatcgggatatgcgtatctttatttaaaccgataaatttcatgttgtccgggagcagatcaggctgaagcacaaagagaaaccagatcggaagaaataaagtagaagcaagaataccgaaaaatcttacccatcttaaaaaggtcccgactgaaggcgcctgcctatattcttcagcatgctgcacatggtgaaataaagtcgtcggggtaatgatcacactcggcgatgtgtccactataatgataacatggccttctagaacatgatttgcggccacatccggtctttctgtatagcgcacgagcggaaaaggattatagctttgattaacaatgaattcctcgacagttttgtctgccattgttaatccatcgacatcaatggatgcaatttctttttctacgatctcaaccagatccggatcagctatatcttctatataacaaatgcttaaatccgtctttgaccgctcaccaactttcgtcatcttgactcgaaggcgttcgtctctgatccgccttctgagaagggccgtattgacgacgatattttcaacaaatccgtctctggctcccctgactaccttttccgtatcaggttcttccgggtttctgcccggatagcttctgacgtcaattataaatgcgaaacctgcaccttcaacaatgacagcgacgagcccggacagcacttggtcggtggtttcatccaatgtttttactttttcgacctgggcgttcagcagcctgttttcgacgatgtcgaccagctcatcagggtcttctttccgattgttaatggcaacaagttctctcattaaatgaataatataggctgtatcgcataatccatttagatagtaaagctggatctctttatctaaaatcgtgagcttgcgaacacctacatcatagctcgtccccatcccgacacggtttttgaaatactcttcatttttagctggattccgataaacccgaattttctcttccttgtggtccggcatgatacccgctcctttctaaaataaactcgaccgctttcatggtgattggcgacccttttgagatatcgtcttttctgcccattttgccgatatccccgataccaacaataagcgggagatcaagtttatcaaggcaatagactgtatctccactcattctgtggtcatcaaattccctttccccgactttatcgacgccgtattcagttatttctccattgcggtcaatgcttacatcgaccctggtccattcagcctgatgtgtttttgacgcgaccgcaatcacaccgagcacttcaatagacggatgggttgcgacataggtcagagcggcttctcccggaccctctccttgaaggccggagtcgtcaaacatgacaaatacaggatcatacggtgctgaggcgatcagcttgacaagctcggcgccgctgcgggtggaaggattcccttttgattgtgaaatacatcgacctcccactttgcttgcggcgtattcaattgttttagcggcataaacatccccgtctgttaccagtatgaccttgcgttttgtcgtcatgtcggcattatcctttcggtttgaaaataacagctacgataaaggcgaaaagaatagcggctgagataccggccgaggtcagctcaaaaatccccatgccgattcctataaatccgtgtatatgcgcctgatgcatagcaccgtgcagaagactgtgaccgaagctgacgatcggaacggtggcgcctcctccggcaaattcaataaatttatcgtaaatgccgaaaccatctaatattgcaccgattacaacaaatgatgtcatgacatgagctggcgtcaatttaaaaatatccaagagcagctggccgacgatacaaatggccccgccgcatacaaaagccaaaaggtagtccatgttaagatgcacctcctgcacgctcaaatacaaccccgtgggcgatagtcgggatggtttctttttgctggatcatcgtcgggcttaacagcgccccggtcgccacgacaaatacacggtttaattttccttctctcagctgcttaaaaatatgagagtaggtgacaaccgctgaacaagcacagccactcccccggcaaagacctgctgatccggagtgtaaatcagaagcccgcaatcatcatgctttgtgccgactggatatccatcttcttttaagatgtcttttacgattggagaaccgacgcctgacaggtcacctgtcaggattagatcatagtcatccgctgtccggttgagatctttaaagtgctgcttaatcgtatcagctgcagccggagccatagccgatcccatatcaaaaggatctgtaatccctaaatcagaaacctttccgacagtcgcacttgtgatttggatatcacccggtgtctgactgatgacaactgcaccgcttccggttacagtggaggtagcagtgtccggtttttggcctccgtattctgtcggatagcgaaactgtctttccgcagttgcattgtgactgctggtggcagcaagtgcccttttggcaaacccgccatcaactaaggctgatgcgacagccactgtttccattgatgttgaacaggcgccaaacatacaaagaaatgggattttcaagtgtcttgccacatagttagccgtcacgttttggttcagcaagtcgcctgccagcaataggtcaatatcatcttttgtcagattgtttttttgaagcgcaacattaacagcgtcttccatcagctggcgttccgccatttcccagcttttttgattacaatgcatttcgtcataggttttatcaaataacgagccgagcggtccgtctttttcctttggtcctgctgccgttcccgctgagttgacaaatatgggatgttcaaatacccaggtttgctttcctgttaatttcattttcttctcctcctatgacatcagtttctcaaaagcaaaccgaatcattccaacgatgtatgcagctacaactccgaaaacaataacatttcctgccagtttaaacatatttgtcgctactccaagcactaatccttcacttttatattcaagagccgcgcttgccatactgttggcaaaacctgtgacaggtacggctgaacctgcgcctgcgaattgtccgattctgtcatagatgccgaaccctgtaagcagggcggaaattaatatcagcgttgcagctgttggattccccgcagttttttcattgaaatcaaaaaaatgaatataaaaattttgcagaccttgcccgattgcacaaatcagtccgcccactaaaaaggcttttacacagttccagacgtaaggcggcttaggctgatatgttttcacttttgatttgtaattttcttttatgtttgtcatcttgaaacctccttatgaatggtcaataaagtacagccaatgaaataaggatcccgcgattttcccaatcacgatggccattaacagaataatgattttacttctgagcccgattcgttttgccaaaatcggcaggacatttaaaacctctgtaagagcagccgctagcatcccgacgaacaaacctgccagaagcccgaccggcacagctatccattttgttagataaagatgattcatatgaagcgtctcccatcccccgcaaaccgcgccaagaataacagccgcttcataagcctgaacaaatctcattgttttggtgagctgcatcagccgcggaatgattcccattacggttaaaaaagcaacgaaacccgcccccaccgttatgcctccgccgagcccgacaaaaataatgaacaatacactaacgatcatgcagatcctttatggtttcttgattctcatgcatggccacatattgatcgagatcaagctgatagttaaacatctcaacctccagcgggctgggctcttcatttaggcgctttttaaatatgtggttaaaaaacacgatcatccccagtcccaaaccgatgctgtatgggatttgaagcaaatatggatagtcattcctctctccggttatgatttcatatagtgcgatatgaacatctctcatgcttacatcctcatgaaagttcatgatggcaagacacgatccaataaacagaagcagccagacaccgataaatagaaccgttgataaatttcgctttcgatattgaatttcaacaatggtttctgctccgcctacggtttgaacatcaagtgtcggatcttgtaaatgaatggctctgaggacttgtatgatatccagaattacgatatttttatctttttcgctcacctgataaagcggcatagccgaaagtttctttttcagctgaagctgcccttctatttgcgcggcatctccaacggtaataatatcccctggatgtgccagcacccggtggcgaagccggataaatattcgtcgttccatcattgatcaccatctttcggtggttatatatgtagtatgtggttcgattttgttctcattcatccgctcgaaaagaccataaattaccacgcttttgcacataaaaaagctagcctgcactgcagactagccatccgtatgatccatttgaaccttgatctgttttaatattttcttttcaagcctggaaacctgcacctgagagatcccgagccgctcagccacctcggactgtgtctggtctttataatatctgagatagacgattagtttttccctttcctccaaatcgctgattgcttctttcagcgcaattttgtcaaaccatttttcttctgagttgtcagcgatttgatcaagcagggtaatcggatctccgtcattttcataaacggtttcgtgaatcgaagatggagcccttaccgcctcttgggccagtacaacatcctcagcttcaatctccaaatggtcagcgatctcctgcaccgtcggcactctgcccagtgttttcgaaagctcatccttcgcgcgccggattttgtttccaagctcttttaatgatcgtgatacctttacagttccgtcatcacggataaatcgctggatttctccgataatcatcggcactgcatacgttgaaaaacgcacatcataggttaaatcaaatttgtcaacagattttaacagcccgatgcagccgatctggaagagatcgtcaggctcatatcctctgtttaaaaaccgctgtacgacagaccaaacaagacgcatgtttttttctatgaggaggtctcttgcctgctggtcgccattttggctttgtttgattaattcctttacttcatgatccttcagctgagcgtttttgccgtttttcttaacctccacatccataacaaatctccttaattacaaagcgctttgctttttgataagtgctttgttaagcgaatcgttgttcccatttcaggcgatgaatcgatactgacatcatccatgaaattttccataatggtaaagcccattccagagcgctcaagctcaggcttagtcgtaaatagaggctgacgggcttcttcaagatctgtaatgcctaagccttcatcacgaatagtcatatatacgacatgatcttccagcgtcactgaaatgtaaactttcccttcacagttctcttcatatccatggataattgcatttgtgactgcctctgacacgactgttttgatttcagtcagttcatccattgtcgggtccagctgagctataaatgaagcaactgtcacacgggcgaacgattcattctgactgagggcagaaaactcaaggtgcatttcatttttcatgatgccacccccagtgtcaggagcgcctgctgttcagattgttcaaatcggataattttaaacagacccgacatatcaaacaatcgcttcaccgcaggagagatagcgcaaacaaccatttctccgccaatttgcttaatttgcttgtatcttcctaaaataacgccaagccccgagctgtccataaaggaaaggtcctccaagttcagcacgatatggcgaatatcatccttctccaatgattgagtcactttttgcttcagggtttcagccgtatggtgatcgagttcgcctgttaatcgaatacaaagcacagattctttgacattcatgtcaattccaaggctcatgctcattcctccttgatatgatcggataatgagtgtttcgatttcgacggaatgaattccttcaccgtgacaaaactagtggtcattcggcataattacttaaattttgtccagtctcccatcgtccgctttaagaatgtgataaacccggctttcttcatatcttcttttgcagcaacaggactttcagcgagtacttctccatcctttttcagaacaagagtgccaagctcttggcctttttgaatcggagcactaatattgtccttcatcttgatttcttttttcacatcgttcatatcctcgccttttttcgtcaatattgaaatcggctcagatgtagtgagttcgatcaatttttgtttcccttttttgacctttacttttgctactgtttgatttcgtttatataaaggatgcgtttcatattgactaaaggcgaagtcaagcatttttgtcacttgcgcgtttctttctttaggcgtgctcgctccgaatacaaccgctatggcccgcatgtttccttttttagccgaagcagtcagacaatatttcgcttcgcctgtatagcctgtttttacgccgtctacaccaggataaaatttgataaggcgatttgtatttacaagccaaaactttttatctgtattttcacgcagataatcttcatacgtgccggtaaacttcgtaattgattcgtatttcaataattccttagccatgattgccatgtcataagcagagctgtagtgtccttcctcggtcagtcctgttgggtttttaaaggatgtatttttcaatcccagctcttttgcttttttgttcattttcttcacaaattcttcttcagagccggaaataaattcagccatggcgacggaagcgtcatttcccgaagcgattgcgatgcctttcagcatttctttgacagtcatttcttcgccgggctcaaggaatatctgtgagccgcccattgacgccgcatgctcgcttgtacggactttatcactcattttgattttgcctttatctaaagcttccataatcaaaagcatcgtcataattttcgtcatgcttgcaggcgccagtctctcattgctgttcttgttgtaaagcacttttcctgtgtcacgttctatcagcaccgcagacttcgcttcatgagcaagctccgatgtacgttttccgtcttgttttgcaaatgcagacggtgcaaatgtaagcagcattataccaatcaacaaagtggataaaagacgtttcatctcaaaagccctccatttcataatcctttttattttttccaagcgggatggttttatacgccactgatggaaaatgtttcgaattttgggcgtaaaaaaagacagctgtgtgatatcagacacagctgtcttttggtcctgcattgattcatttttattcgtactgagcgacgatcgctttaacaagctttaagaatccagcttttactttttcggtcacttccataacttcatcgtgacttaaaggctgatccagaattccggctgccgcgttagagatgcaggaaatgccaagaacccgcattcccgcatgattcgctacaatgacttccggaacagtagacatgccgactgcatcagagcccatcgttcttaagaaccggacttctgccggtgtttcgtaagaaggtcctgtcacagcagtgtacacgcctttttgaattgggatattaaggtctttcgcaatcttttcagccaggctggacagatctttgtcataggctgaagacatatctggaaatctggcgccgaaatctgcttcgtttggcccgattaacgggtttgttcccataaagttgatatgatcggtaataatcattaagtctcccgcacggaattcagtgttgacaccgcctgcggcatttgtcacgatcaacgcttccacaccgagcgctttcatcacgcgtacagggaatgtgactttctccattgagtagccttcataaaaatgaaagcggccctgcattgcaatgacggaaactccttcaagagtgccaagcacaagctgtccggcatgcccttcaacagtagataccgggaattcaggtatatcttcatatttcagcttgaccggattttcaatttcgtccgccaaaatgccaagacctgagcctaaaataaggccgatcttcggagattccggcaggttttgtttaataaaagcggctgcgcgttcaattctgtccttcaagaaacagtccccctattgtaataaagataaaaagcttttcccgtatttcggtttattcgtttggaaattatcagcgatcgttgcaccgatatcagcaaatgtatctgcaagcggcagcatttgcgctttcttatgttttttgctgtaagcgagaatcggcacatactcgcgtgtatggtcagtcccatgatgaatcggatcattgccgtggtcggctgtaataattaacagatcgtcttctctcattttttcaaacacttccggaagccgcgcatcaaattcttcaagcgcgcgtccgtagccttcagggtcacggcggtgtccgaataacgcgtcaaaatcaacaaggttcgcaaagctcagacccgtaaagtcttctcccagcgtatcgatcaccttgtccattccgtccatattagaaaccgttctgcgtgaagaagtaatgccttctccgtcgtaaatatcagagatttttccgattgaaatcacatctaagccgctgtctttcaattcattcatgacagtgcgatcaaacggcttcagcgcataatcatggcggtttggcgtccgtttgaattgacccggctctccgacgaacggccgtgcaataatgcggccaaccatatatttcggatcaagcgtcagttctctcgccgtttcgcaaatgcgatacagctcctcaagcggcacaacctcttcgtgagcggcaatttgcagaacagagtcagcagacgtgtaaacaattaaagcccctgtctccatgtgctcctggccaagctcatccaaaatcgctgtgccggaagccggcttgtttccaataattttgcggccagatctcttttccagctcttgaagcaattcatcaggaaagccttccgggaacactttaaacggtttatcaatgtataaacccataatctcccaatggccggtcatcgtatctttgccgtttgacgcttcttgcatttttccataataggcaagcggatgttctgttttttctacacctttgatatcttcgataagaccaaggccgagctttgccatattcggcatatgtaatccgttcatatgctcggcaatatgaccgagcgtatgagcgccttcgtcattaaagtcagcggcatccggcgcttcgccgattccgactgagtccatcacaattaaaaacacacgattatatttgtatgcaggcatcttgaaagcctcctttttttctatacgtctattgtatcgctaagaggtctgacaactcaagtataaaccgttttcattcccgttgacaatgtatttggaaataatgagaaacttcaatattttctgtcgctctaaacaaaaaagccgcagccacctgcggctatgctcgcggatgaaactgcttgtacacatccttcagccttgttttcgtcacatgcgtataaatttgcgtcgtggatatatccgcatgcccgagcatttcctgcaccgctcttaaatctgccccgttctcaagcagatgcgtcgcaaaggaatgcctgagcgtatgcggagtcagctctttcttaatgccggcttccaacgcgatttttttcaggttcttccaaaatccctggcggctgatctgtttgccgtgatgatttaaaaagagggcgtcagacacattgttctttaacagttttcccctggcttttgtcatatattcctcaatggcggaagcggcggcttcaccaattggcacaatccgttcttttcttcctttgccaaagcatcggataaaccccatagataaatgaacatctgccgttttcaactcaatcatttcactgactcgtatgcctgtcgcataaagcagctccagcattgctttatcccgatagccgaatgggctcgtcagcttaggcgtgtccaataaccgctcgacttcattgagtgcgagcaccttcggaagcgcccgttccgtcttttgtgtttcgatatgaacggaagggtccttatccgttactttttccctgagcagaaattgatgaaaagagcgaatggatgccaaatgccgcgccgatgtcttaccggatttccccgagtccttcaaatactttaagtattggataatatgtatgcgggtaacgtggttccaatccgtcacatgaagggtttctgttaagtagagagaatagcttttcaagtcacgttcataggatacgatcgtattttgagagagccctctctctaccatgacgtagtggatgaaatcctttatttgatctttcactcttgatctactccccgttttggtaaaaaaagatcaaccggtcgagccatccgcctttttcatcctgatccatttcaacaacttttacagcggagccttccggtttatcataccgatgatagttttcatactcttgattcacccatatcatagcataatagaacaaagcggtaaaaccggtaaacaggatgaaaactttcaatgcatcgacagctgttttcaggaatcttcccatgtcctaatcgatcctttcctatggttccagttatataaaccatatgccaaatcagaaaggttttatacatagaaacagcaaaaaaccctttccccatgagaaaaggttcgcgctcggcaccatctattcagtttcttttccattacagcggtggcaaatgccgtgaaacgtcaatctatgatctttaatcttaaatttccaatcacgttcaatgatttcttccacgtcttcaagcaaatcttcttcaatttcatcaacggctccgcactccatgcacaccaagtggtgatgaaagtgagctgcgccctctttccgaaggtcgtaacgggacacgccgtctccaaagttaattttatctacgacttttaattcagttaataattcaagcgtacggtatactgtagcgagaccgatctcaggagatttctcttttacgaggaggtatacatcttctgcgcttaaatggtcttcttcgttttcaagcagcactcttactgtcgcttcacgctgtggcgtaagtttatagctggatgagtgcagttgtttcttaattcgatcaatacggttttccatgtctttccctcctacgccgcattccatgactcattataacaaaatacgcgcagagttccaactataattattataaactgataaataaaacggttttcttttaataataattttaaaaaagtctagatgtaagcttttccattaaaacaggagataagtatgcttcaaacagagatgagatcagcgctaaaaacagaatgaccagcagcacaaaggcataccgcccgaaccattgaatcggcgcgtcatgcaggcttcgtttcacgaacagctgtctgattaactttaaagaaaacgcaattgcacatgtgcccataatgagataagccggaatcagcagcacattttgcggcaaaacggcgacaaatgataggaaaaacccgcttactcccatctgattgactaggaacccgacagtaaagccgacgacgatccctttcagaaagatcataatgaaaataatcggcatcccaatgacggaaattccgagtatccacatcaggcctaaatactttgcattatgaaagatactttgcccaaacatatcagctgaacttgcctgttttccatccgaaagctgtccaaaaaattgacttaagtagtagtataaatcttctttctggctgatggtcatactgttgacaataatcgcgccaaagatgacacccatgaaaaacagcactgacacaaatatataaagagagagatgatctttgacatgcctgagaaacatgtccttataagagatttttcgcataccgtttcctcccgcccgttctagtgatttgatttaatagattgtatgaaagaaacggaaaaacatgccctttttcaaaaagaaacgatagagatgaatgctaggcggctttttggggcacaaaaaaatccttatcatcaactgctgtatgatcataaggattcttatgcttccgtttattcaaaatctcttttttgctttttgtcattctttcatgtgtgctgaaagatggtgtgctgcctcttgataataagacgtcacgtccgccgtttctcaatcgatgcccccgcttctttttcgcttggctttttgccatgtgatcactcccttttttattttcatagtaatgataacaaaattgaacaatgataagaaaaaaacagcacctgctacgacaggtgctgtttagctacatttatttcactgctgtaagagctgcatgctcgacagctgctgctaccgcatgatggacttttgaatcaagcggctgagggacaacatcaccttgtttagtgcaagctgcgatggcctctgctgctgcgacaagcatatcatgattaatctccgtgctttttgcgttaagcgctcctctaaaaatccccggaaaaccgagtacattattaacagaacgcccgtcagctgcatatgcggcgccagcctgcagcgcggcctccggttcaatttccggcttcggattcgataaagccaaaatcacttgaccagaacgtacaaatgccggttttattaaacccggaacgcccgttgtagcaatgacaatatcacatgtttccatgagctcctcaatactggaaactgcctgtccgccgtattgttcgagacgattcattgctgactctgatttgtctgttccgtacacagcattcacaccataagccatgaacatccggcagatggccacgcctgctgcgccaaggccgatttgccccactttcgcttccttcaggtcaacccccgcactcctgcatgccgaaatggcagctgccagcgtcactacagctgtaccatgctggtcatcgtgcataacagggatgttcagctcctcttttaggcgatcctcgatttcaaaacaatgcggcgaaccgatatcctcaagaaggatgccgctaaagcccggagaaatatgttttactgttttgatgatttcttcaggatcactcgtatcaagcagtatcggaatgccgctaatacccgccagctgatcaaacaaagcagcctttccttccatgacaggcatgccagccacagagccgatattcccaaggcctaaaattgcggttccatccgttacaattgcaacagaattgctgatcgttgtataaatagaagctttttcaggttctttttcgatcagtcggcacacgtccgcaacacctggtgtgtagacacgtcccagctctgccagtgaacggatcggcattttgcttttcatttggatttttccgccttcatgtgcggacaggacttcatcagatacggtgtgaagcctgatcccttctccgagggcctgtacagccgcgatcacttcctgaagctgttcttcattctccacttgaacggtaatattccgcattgtgtaattgggtccgacttttaccgtctccacttcaccaatatccccgcccagaaggccgatggccgtagccacccttccaagatttccgggaaccgaaggcgtttcgatcatcagtgtccgaatcatgtgtttcgctatcattcagtgatcctcccctattagcctagtttttcggctttaactgtattgtttttcgtataccatataaattttcctgtataaccatagataattgcaagacctattgctacaaaactgagccacataaacggcagataagagaaggtagaaacacctaaaataccagccatgtaaatcccattatcagaccaaggaaccatccccgaagtcaatgttcccccgacctctgagttacgtgataacactcttctgtccagatgtaagcgatcatagctgtcttccataattttcggagtcaaaataagagatacatacatcgcacagccgaagatgtttgctaaaaacgctacgatcagtgtagacaatgtgacattgccggctgaagttaatttcttttcaaacgttgaaacaatgacttttaacacgccgagtttctcaagcagaccgccaaaaccaaggccaaagatgatgacgacgagagaatcaagcataccgacaattccaccgcggtttaacaagccgttcaaaaattcaacatccgttttaatagagaagccgttgtacgcagttgcaatcgcatgggcaatatccattccttggaaaacaacagcccagattgcaccgagtaaagcgccaattacgataaccggcatagatggctttttcatcgccaataagactatgacgagaactgccgggatcagcatccaaatatgaatgtcaaacgtgttttgcaaagatgattttaagaattcaactttatcaagatcaatatttttcccgccgtacataaatccaacaactgtaaagagtatagctgtaatgacataagcaggtattgataaataaagcattgctctcacgtgagccaatacatcgacttttgatagtgaagaagctagaactgtactgtcagacagcggagacagcttgtccccaaaataagcacctgaaagaatagctcccgctactagaggaagcggaatgcctaacccctctccaattgcgatcatggcaatgccggcagttccgactgttccccatgacgttcctgttgccacagacataatggaacaaataattaacgttgccagtaaaaagatacttgggtgaataaattccagtccgtaataaatcaaagtcggcacaacgcctccggcaatccatgttccgatgagcgccccaactgaaacgagaatcagtacggcttcaaggccatttgatatcccatgtacaatcgcattttgtaaatctttataagaataaccgagtctaatacctaaaagcattgcaataaaccatgaaacaaaaagcgccagctgtatcggcaagtcgagaaagactgtaaacgatagaacaagtgctaaaaatactcctagtacaataataatttcaaatagtgttggcaatcttacatccttcaaaagaagtcccccttcatgtaaaagctaaaacgctttcaatatatagtgcaacacgtatactatacttcctcatccctatgttgtaaacagcttattcatccgactattcggagatgaataagctgtattttatacaaattttatttttctaatagttctttccctgcgatacctggtttggtcatctcatatgggtttaaaataatatccaattcttcttctgtcagcacatcatgctgcaggcaaaggtcacggactgattggcctgtcataatcgcttccctggcaattctggcagccgcttcatatccaagatgcggattgacagctgtgatcacgcctgcgcttttttctacgtattgcttcaaccgcttttcgttggcttcaatgccttttaagcagttgtcagtgaacgaacggaagccgttgttcatgatgctgatggattgaagcaaattaaagacaagcacgggctccatgacgttcaactcaagctggccggcttctgaagcaaggcagattgtattgtcgtttccgataacctggaacgcaatttggttgatcagctccgccataactggattgactttccccggcataatagatgaacccggctgacgtgcaggcagagaaatttccgcaagtccggcgcgcggtcccgacgccattaagcgcaggtcgtttgcgatcttcgacatgttcatcatgcagacttttaatgaagctgatacctctgtataggcatctgtattttgtgttgcatcaacaagatggtcagcgccgacaagaggaagcccgctaatatcagcaaggtgctttactacctgtttgatatattcaggatcagcgttcagccctgtaccaacagcagttgcgcccatgttgacttcatacaggtgctggcgcgattgcttgattcgtttgatatcacgctcgagaacacggctgtaagcttcgaattcctggccaagacggatcggaaccgcatcttgaaggtgtgtccggcccattttaataacagagtcaaactcctgtgctttttgcttaaacacactatgcatatcttccattgttttcagcagtttttccaagagcttcaatgtggaaatatgaatagcagtcgggaacacatcgttcgtagactgtgacatgttcacatgtgtgtttggacttaaatggatataatctccctttttatggcccatgatttcaagcgcccggtttccgataacctcattcgcgttcatgttcatagaagttccggcaccgccctgaatcggatcgacgataaactgatcgtgccacttgccttccagaatctcgtcagcggcttgtacgatagcttggccaattccttcatacagccgtttcacgtccatgttggcaagagccgcagcttttttcacaatcgccagtgcgttaatcatttcctcatggattttgtatcctgtgatcgggaaattttcagaagcacggagcgtctgaattccgtaataaacatctgcctcaatttgtttttctccaaggaagtctttttccacgcgatattctttttggccgtttaacataatctttaaccttctttctctttgctggttatcgtttttacattttacaggacaacgtcatcagcaatcggtgtttccataattctcttgacgacaggaagatccgaagactgacctagtgcccacatcaattttggcacaattgcttctgtgttcatatttcttgatcggataattaagtcttggttgaccctgcggccaacttcgtaaatgctcatgtcttcgccttcttcaagacattgagtcgtaatgacgacgacaatgccgctttcgatcagttcattcacttttgacaaaatgtctctgccttcaaacggcacccctccgctgccataactctcaatgacaatccctttgtacatgcttttcagggcatcaaacatttcaggctttaagcctggatgcagcttcagcagacatacatctgtgcatagtgaagtgtcaactgtgaaggtgtcgttctcaggttccgttacttgtttgttgtattcgatcccgtcttcattgataaaagcgatatatgggtaattgatgctttcaaatgcgtcgtagcttttcgttcttaatttgatcgcacgcgttccctgaatgactctgccgtcaaacacaacataaacgccgcccacgccttcacaggcaaatcgaatggcatctgtaatattttttttggcatcggttttttggaacgtgatcggaatctgcgagccggtgatgacaatcggctttttggcatgctgcagcatatacgatagtgcggcagatgtataggccattgtatctgtaccgtgagtaataacaaacccgtcataggcatcataattttccttaacggcttctgctatttccacccagtattcaggctgcatattggtgctgtctatattcataagcgactgagtttccattgtgtaatcgttatcaagttttgatacgtaacttaataattcatcagccttgactccgggagccagcccattttccccttcaactgaagcaatcgttcccccagttgtcaacatcaataattttttcataccatgcacctcttcactgtatctaaagatgggttgcgagaaggtattcgcttttcgcatacttttaatgcaattatagacacggaaaataaaatacgcaagacattattattcaattcgcgtacacttcctaatacctatatgatataatcagctcaaggtgaaaaaggagcggaagttcatgaatctagatcgtttaactgaattgagaaaaaagaaaaattggtcgcttcaatatacagctgaccttctcggtatcgcaaaaagcacatatgccggctacgagtcaggctaccgacggccttcacttgaagcgcttgccatgctggctgacctctttgacacaacctgcgatgaacttttaggccgcgagaaacaaaagcagactgctcctcaggccatagaattggccacgtggagcagccttgactttaccatttctgttgatggccagccgctgagtgaagatgaaatcatccagctgattacctttatacgcacaaaaagaaaagtacaggaggaactgagttaatctttagctcacggtttaattttaccgtaggttcctcctcctccggctttcaattccagttttccggatctcgcttttacgataagcgccgcagttttcggcgggacaatgcgagccaaatcttcttctgcagcctcatgaagaacagccatttctgttccgaaggctttttttagtttgtccagcgttttcgggcctacacccggaacaaattgcagcgggatctgatgtacatatcgcggacgcgggacgcgaacttcaagctgatcactcaattcacgcaatctttcgctgactcccttggtaaatctggcatttccgcaattcgcgcacgctgtttccccgcttacagcaggctctccgcacgcttcgcaagcggtctgataatatttccccaataacgggtccaagccataatttgcgataattttcctgtcatcttgtccctttaatgcaagagcaaattcagtaaaatcagctgactgcacatatagttcattatattctctgccgattttccccaacgaatgcgcatcagaatttgttaaaaaaggatacggattcaattcagatacctgtgatgccatgtctgtatcacagcttaatccaagctccaccgcgtctatcatagatggatcaaaaacctcagttaagcttgatttaaccccttttccatataagcttttatgcggcgtaaagatatgggcggggataaacaagccgcccatatcctgcacttttttttgcaggtttaagcccgtttcataaatccgctgcgagcttaaatgaatatttttcagccgggctgacagccagtttgaaaactgtttcatatcagccagcgtcggcataaatacgagcacatggatcggtccgctacaggcttcatcataaatctccagctcgctccccaataaaagagtcgtgctgcgataacggattcctcccccgtcaagctcgcgatattttccagatgaaatgccttcctcaagctctagaatgacttccggagaatgacagtcgataatgccgaggagttcaattcctttatgttcactggcttcaaccaaaattctgtccagtgttaatgttttagcgcctgttattttgacagcccttcctgtaaaggtccggccgatatgaatgtgcaaatccgcgtaaatctttttcatttttgtgcttggagcgcttctttcagctgaagatactgaatcgcgtaggctgttttagcatcgtatacttcacgcgattcaaccagctttagcgcatcttcaagcgtcacctccatcacttcaacaaactcgtcctcatcaagctcccgtttttcttcaagcacagaaagctcctcagcaagaaaaacgtgaacgatttcatctgcaaatccgggtgatgtataaaacgcagttatttttgtcagtttttttgctgtataaccggtttcctcttcaagttcccgaagtgccgtatactccggctcctcacctttttcaagcttaccggccggaatttcaacgatcgtccgctcaagcggcttacggaattgtttgaccaggatgattttcccttcatctgtgacggctagtaccgctactgctccagggtgtttcacaatttcacgtttactggctttgccgtttggcagctctacatcctcgacataaagatcaatgactttacccgaaaagatctgttctttggcaattgttttttcttctaatgatttcatttcttcatctcccgttctgtctctatatgatgccccatacattttatcatactagagcaaaagggggcttcttcgtgaaagtgcaccgcatgccaaaaggtgttgtcttagtcggaaaagcatgggaaattcgggcgaagttaaaagagtatggacgcacatttcaatatgttaaagattggatctcaaagccataaaagttgaaactttagctcctttatattacggtcaatacaaagcctaaaaaaggagtgtgcacatgagaaagcgcaaattgggtacatctgatttagacattagtgaagtcggactcggctgtatgtctcttggaactgaaaaaaacaaagcattgtccattctggatgaagcgatcgagctcggcatcaactatttggacacagcggatttgtatgaccggggacgcaacgaagaaatggtcggtgatgcgatccaaaacagacgccaggatattattctggcaacaaaagcgggaaaccgttgggatgacggaagcgagggctggtattgggacccttcaaaagcttacataaaagaggcggtaaaaaagagccttacacgtctgaaaacagattatatcgacctttatcagcttcacggcggcacgatagaggacaacattgatgaaacgatcgaagcgtttgaggaattaaaacaagaaggtgtcatccgctactacggcatttcttccatccgcccgaatgtgattaaagaatatgtaaaaaaatcaaacatcgtcagcattatgatgcaattcagcctgtttgacagacgccctgaggaatggctcccgcttttagaggaacatcaaatcagcgtagtcgccagaggtcctgttgccaaagggctcttaactgaaaaaccgcttgatcaagcttcagacagtatgaaacaaaacgggtacttgtcctattcattcgaggaactgacaaatgcccgcaaggcaatggaggaagtggctcccgatctttccatgacagaaaagtcgctgcagtatctgctagcacagccggctgtcgcttcagtgattacaggcgccagtaagattgagcagttacgggaaaatattcaggcagcaaatgcacggcgtttaaccgaggaggaaatcaaagcgctccaatctcatacgaaacaagacatttacaaagctcatcgctcatagcagaaaaaccagcacccgtacaggtgctggtttatttatattgatgccaatccatttggctttcatttaggagttcttcaaagctcttatttttttcgatctcttttttctttctgatctgttctgctttttctctttcctgcctcttttcatcctcttccttcaattggctcttcatctccataagctttgctttgatatcggattgaaggccgtcttttagctggtgtttgtcagcaagatttttgttttttcattcagacttcccccatgttttgttttgaagacagtttatcacggagcatatacactgaacaagccgactctcttctgatcactttctcagcggagcagtgtttaggtataatgatttcaaacacgaattgcctatatatttagttgaaaggtgctgtgacttttgaagaaaatccttttggccattggcgctctcgtaacagctgtcatcgcaatcggaattgttttttcaaatatgattctattcatcaagaaaaaaacggatgaagacattatcaaaagagagacagacaacggacatgatgtgtttgaatcatttgagcaaatggagaaaaccgcttttgtgataccctccgcttacgggtacgacataaaaggataccatgtcgcaccgcatgacacaccaaataccatcatcatctgccacggggtgacgatgaatgtactgaattctcttaagtatatgcatttatttcttggtctcggctggaatgtgctcatttatgaccatcgccggcatggccaaagcggcggaaagacgaccagctacgggttttacgaaaaggatgatctcaataaggttgtcagctggctcaaaaacaaaacaaatcatcgcggattgatcggaattcatggtgagtcgatgggggctgtgaccgccctgctttatgctggtgcacactgcagcgatggcgctgatttttatattgccgattgtccgttcacatgttttgatgaacagcttgcctaccggctgagagcggaatacaggctcccgtcttggcccctgcttcctatcgccgacttctttttgaagctgaggggaggctatcgcgcacgtgaagtatctccgcttgctgtcattgataaaattgaaaagccggtcctctttattcacagtaaggatgatgactacattcctgtttcttcaaccgagcggctttatgaaaagaaacgcgggccgaaagcgctgtacattgccgagaacggtgaacacgccatgtcatataccaaaaatcgggatacgtaccgaaaaacagtgcaggagtttttagacaacatgaatgattcaacagaataaaaaagcgaaaggcctattcggctcttccgcttttttatgttacagaacgtcggtaatgccatccatattttctctgatccattcaatcgcaagatctatcgttgtaaactcctgcgtctcaaaggtcatttcatcctgcaatagccagacatctttcttgatggactctgctcctccgattgaccagtgaagcaaggtatagggatggttttgattcaggaaggatacccacgttttattttgtgctgtgttcttcattgccttcagcttttgttccacgtttcgcgtctcctactttactaatatgctcattctggggctgagcatttcagccgggcttttcagcgccaatgttttggctttttcattgtaatcgatcgtcatttgatcgtcaaaaaacactttttgtgacgattggatatacagcggaatgccgttcgtttccagctgctcgcactgtcccgttaattcttctgccagccagattgtggggacaccgcttaccgcgcagccgcatccttctgcatcgtaacgaagctgggctttttttcccgggttggcgtcaaacgcctgctgcagtgcctgttttgctgcatctgtcacatgtatgttcataaggtgaaacccccgttttcatcattttcgctattgtagcatacaacactgccattcgcattgtttctgccttttttccaccgcttcgcattttcttctgcagtcttgatccactcatctttcccttttatgtactgattgatgctgtcaggatgctgggccgccagccgttttttgagaacggcgtattctttcgctatgtttggatgagctctgagataatctctgaataacagatgcctttcaatagcagggtttccctgttcgtacatatggacatgatgagtgcgtttatttccgcccttttggaaataacgcctgcccgctatgccgttctcaccttttggtgtatagccgttagccttcatttgttcatcaaattggctcacggcttcaatgcttctgacttcaattaacatatcaatgattggcttcgctgccatgttcggtatcgatgtgcttccgatgtgatgaacagcgataatctccggcccgaacacaagtttcagcagttctttttcttcatcgaaacattctgcccatttttcgttgtagagaatgacctcaacttttcttttcggatacaaatgaaagaccgacagcaatagaccctgcgctgctttgacggtttctgccttttggaatccggcctgtgtatagagtgacacggccggggtattgttctcggctgtgactacttcgattttctcagcgtcttcattatgatcaatgacaaattgcagaagtgctcgtccaattccttttctgaaaccgtcaggatgcacaacaagcctgcaaatggtgagatgatgcatgtttttctcatatgaaatgacaccgatcagcttgccgtttttccgatatcccgcaaaccgttcatgggatgcttgaatatccttcaccttctcttgtaaagcgggaataccgtcaaaaccgataatctctgtttcctttatgtaggcggggatctgtacggctaaaatctcacgcgctatcgtgtcttccttatgctggagaaattcaatcattcgtgttcctcctgaaacagccgctgtctttcgacttttgcgacgcggactgcatacgactcgtaccaaaggctttttcctttttcttttgccgcttgatgttcagtgtgatgcttccaatggttaattgcgtccatactgtcccaataggaaactgtgatgccccttccatccgcttcacgtacgctttccacgcctaaaaatccaggctgatccgccgcaagtgataccatccgctccgctgtttctccatatcctgtgtcattttcgcttttgacagaagaaaaaatgactgcatagtaaggaggctcaggtgtttttgataaaaaatccatcatatttccccctcatatgtttttgacaaacagtaccctgtcttgacccggaccatcatagtttgcaaacactgagatgccatttaccgtcttggtgcccttttcaatatcaaaccccaattttgtgtgatatgcgattgataccttattcacaggtgaggtgacgcactttacccgggtgcagcctctttgttttactgtttcgataaatacatcatacaattgtttacctatttgcatttttctgaaatctggatgcacaccggaaaaatgaatgtacgccgtttcaggatccgattgcgattgaaatccgattaaaaatcccgtcatgctgttatgttcggatgtaataaagcttgtgtcctgaaaatgctcaaaaaatagtctcggcaatttttctttcagctgtctgccgccccaccattcattcagtacagacgttaccatttcataatctgaagacgtgattgttcgaatatccattacgatttgatctccctccgtctggcaaaacgaatgtcagctctttttctcacaatataaaaattatattttgcctggctggaattgtaaatgccttctttcctgtatcatacgtttccagactgccgagggaacaatgtttgatcattttacgcctatttctcccccaaacaggaggagagactttacagcacaatatcaagcacttgatcaagtttcagcttataaagctgatcctcgtctccttttatccatactgctttttcaaactcttcataccggcagattttcccggtgcagcagacaatctcaccgtcctgaaagcagctgacagtgatatcctgagcaaactccatcgcggtgcaaagcgtttgattcatctcttccagcttatcggggtcaaggatcggcttttgcagcttctgtttaagtcgctttctctccagcaggctttgcttatgttccggcagaaacatcctgctcccttcccacagcaggttgcccctttttaaatgatcgttcatttataatgcccccctattttagccgcacgttcaaatgcctggcctgccgctgtcagtgacgccgccctgatgattgctgtgtcgccgaatcgatttttaatgccgtccatcacatagcctaggctcattttctttgcataatcctgaaataaattgagctgccatatgtcatcagatgagagctgagacagattgacaccgagacggcggacaggtttcccgtcccaaaatgtaagaaacagccggcgtacagcctcatatacatcctgcgtagaattagtcggctctgccagcttcacttgccggttgaagcccgtcggccaatcaaaatcagcaccccggcagctcactgacaccgtctgccccatgaccccggcgtttcggcttcgcctgcacacttcttcactcagctcaagcaatacgaccttgatttctttgtcaaagtgttcgtagtctctcgggagagtcattccatggcctatcgccttttgcccgtccagagacgaagttgacacaggggaatagtcgattccgtttgccgtcatccacagcacgtggccgttaatgccccatttcttttttaaaagatcgagcggaaaagccgcgagcccgccgatcgtgctgatgcccattcgatttaaatgatgcttcatgcggctcccgacgccaaacatgctgcccaccgggagcggccacatttcggttttcatattttctttcgttaaggtaaaaataccgttcgtattctttttggcaaaattgtcacacgcaattttggccagcgctttgttagggccgattccgacccgtgcataaacgccgatctcccgcatgattctgccctgaatgcttttcgcgatctccatcggcgtcccaaacagcttctggctgcctgtaatgtccatgaactgttcatcgatagaataaggctccacaaggtctgtatactcctcgagaatggccgtaatttgcagtgatacatcaatataccgctgcatacgcggccggagcacaacagcctcaggacacttttcctgcgcctcccacagccgtgaagcattcaccacacccttttgtttcgccagcgggcaggcagccaatacgactccgccccttttttcagggtcacccgaaacaatgacgggcttatttttcaaatatggattttccgctttctctacagatgcataaaacgattgcatgtcaacgagaaaaatcactttttctttcatcatacacacctctaaaaagaacttatgttcgtttttcattatatgcgaaagtatgttcgttttatactggtaaatgattcttgtctgacagaaaatatgatccaagggtttgagagaagaaaaacatttagtagaataaaagcgaacataaggataggagagtcatgatggagaaatttgtcgaaaaaatgatggaacaggcattgcgtcaatacggcagaaacgttgctatagatccgttaagcccgtatgaaaaacaaagcctgaaagcggctctacaagagagacggaatgaagaaccagatgaggatttgcatgcgcatatagaagatatcatttatgactatgtcacaaaccaaggtctgttctcttaaacgcatgactgtcagttctttcagccgctgatgcggcttccctttgaaaacaccgcctgaaacaaataaacagtctcaggcttacagaaaaaagcaggattttctcacgctccatagattcatatggcctggcgtaaaattccccctcagaactcgcgcaaaacggaataagctgtccatgatcacgcgtatacactttttcgaagagatgtgctctcttgttctgtcatgcggtccatcggttttcagcttacatcttgatctcatagccggtttcactgccgatatgatctacgtcctggcggcttaaactaacacaccctcactgaccaatcgctttgcttttcatcggacatcccgtcatttttcttcttcaatttcaagatgtaaactccgtcagccacacgcatcctcaacgcatagtatattgccatccatacaatcaggcatactacatgtcaaaaacgaaatattttgaatgatctattggagaaggaaattttttcatatatgatagaggaagatcttacatacaggagagaatataattcatgaagaaatggaaagatatccacccgatcagctggacaattataatcggaaccattttcggcagaatggcaacatcgatgagcattccttttttagcgatttatttgacagccgtccaaggcgcatcagcttcctatgcagggctggtcatcgccgcgagctcatcagtcggcatcctcgcaagcttttacggcggatatatctcagataaattcggcagaaaaaacatgatgcttgtatcgattttcggatggatgctggtatttgcaggctttgcggcggcatctcatctctgggtgttttttgtagttaacgcattaaacggtctttgcaaatcactgtttgagcccgcttcaaaggccttgctgtctgatatgacagaagaaaaaacgagactgctagtttttaatttacgctatgcagctattaatatcggcgttgtcttcggacctgtgcttggcctatatttcggctcatcgcaatcgactacgccctttttggtgcctgcagtcatttacggactatacggaattgtgcttgccctccaatttaaaaaacatccatccttatcagcaccagcccagtcccgaaatatgagcgtgcgggaagcgtttatggtcacgcaaaaggattatctttttaccattgctttggtcggcattacgctatgcaccttcggctactcacaattcagttccacattccctcagtatatggcgcagaaccccttgatcggcaatggaacgaagctgtatgggctgatgctgacattaaacgcaatcgttgtgttggcgacgcaatttcccattgtccattttgcaaaacggttttcgccgctttgttctctgatgctcggtaatgtgatggttagcatcagcatggccattttcaccgtatcgcacggtgttccatcaattgtgatgattgtcatcacatttacaatcggcgaagtgcttttattctctatgatggatttgtatgtagaccagattgcaaaaacagggttaaaaggcacttatttcggggcaatcggtttttcacagctcggaaacgtcatcggcccttgggtcggggggatatgtatagacctgtttggcgctggccgtccgatttatattttttctgtcctgagcggcattaccctgctcggcctgccatttttagcgttcgcctatcggcagatgaaaacggagactacaaaacaccgttcccgtctggaaaagccgctttaaataaaaaaacgggagagaatcaatctctcccgcaacaatgaggtgatgaacatgaatataggcgatatgatgtttcagctgtttgtatttattatatttgccgctgttatctttgcggctgttacaggcttcaagtatgcgaaaaaccgaaaagcgcagctggatcgcattgagaaaaagctgaacagcctgtccgaagatcacgattaacagcttggggcaacgagctctaccttaatccgatccggatcctcacaatagactgcataatgcccgtctcctccggcaaaaggatgcctgtctcggtacaacacacgatagccttttgccgtcaatttttcggtcatctgatcgacttgatgcttggattcagcataaaatgcgagatggttcagaccgactcggcatctatggtattccggctctagaaatggctctttcgcctgcacaatcactaggtaaaaacgatctttcttccagctgatgcctgagctccatttttgatactctttatagccaagttcttttaagaaccagccccaaaaccgcctagacgcctccaaatcagagacatacagttcgatatgatgcacaatttcataccctccttaccagcacttcctcgaccttatgcccgtctcccttacgcaaaatgagatctgacctgaatttagtcggcaaaatattttcatataaattcggccggttgacactctcccaaatcgaggctgccatctcgtcagcctcctgatcggacaagtctttaaatttatgaaaatatgaatcaggattttgaaaagcagtttcccgaagcaggcgaaaacgctctaaataccaagtgaaaatccggctttcctccgcatccacataaatcgaaaaatcaaagaaatcggaaacaaaaatacgcgggttttcccggtcatcctccaaggtgggcgactgaagcacattaatgccttcaataatcacaatatccgcctgttctacaacctcgaacacaccttcctcgcggtcataggttagatgggaatacaccggggcctttacgctgtcctttcctgattttaagtcattcaaaaattcgagcagcgcctttacatcatagctttcaggaaacccttttctagacatcatatttttctttttcagctcggcagtaggaaataaaaaaccatctgtcgtgataaggctcacttttggacggtcaggcaaacgcgaaagcagcttctgcaagatccgcgccgtcgtgctttttccgactgcgacactgccggcaatgccgataataaacggaattttggctgaatgtggatgcttcaaaaaaacattgacatgcttattgcgttcagccgcagacttgacatgtaaatgaagcaagcgaacaagcggaatatagatcgtttccacttcttcaacagatagataatcattcaatccttccacagcttttgcctcttcttcagatacagcaatcgacaaatgccccccaaaaccagaccaagactcccgattgtgctgtgtatataaagtatgtaggttaagttctttatttttcactgtttacacctgactctctgtaggttaaaacccttacaaagattgtaacggaaaaccttttcactgtctgcttatttttcatttcgtttttttagcaaatcagcaccaattcggttatacgcagccatttcatcttttggaaccatgcttcctcccgttccccagacgacatgtacagcatgttccatcttatatttttgaccatagcgccttccctcttctgtcgaaaaaagctgaaccggcccgaacatgcccgcaagagcagagggctctaaatatttatcttcagatacagccagcatatgaagcaaagtataaagcgtattgtcctctaccgtataacagccgctcagaagcggttcaatcagcttgccgacaaatcctgacggcctccctacggcaagtccgtcagcagcagtctgattatccaggccgatatcctggacggagatcttttcgtgaagtcctgaataaagccctaacagcatacaaggtgaatgagttggttctgcgaaaaacacatgaacatcatctccgtataaaagcttcagcccaaatgctacaccgcccggtcctccgccgactccgcacggcagatacacaaacaagggcgtctcaagacttggctttatattcatacagtcaagctgcgtttttaatcggcttgcagcaacagcatatcctaagaacagctgtcgagaatgttcatcatcaataaaataacagaatggatcatgttccgcctgccgtctcccttcgttcaccgcttcgctgtaatctgtttcgtactccataacagtgactcccttttgacggaggagatcctttttccactgcttagcatcggcggacatatgcactgtcacgcgaaagccgagtgccgcgccgatgatgccgatgcttaaacctagatttcctgtcgaaccgacagcaatcgaatagcgggagaaaaacccggtaaaccgctcttcctgtaagatgcggtaatcatcggtttcctgaagcattccttcttgaagcgcgagattttcagcatgctttaacacttcataaatcccgcccctcgctttaatcgatcctgaaatcggaagctcatggtcgcactttaaaagccatcttccgggaaatggctgctgatatgccgcttccagctttcccttcatatgctgcacctcaaaaagcggagactcgatgattcctttagcgcctttcgtctcaggaaacacctcggcaatgtaaggtgcaaaccgctgcattcttttttccgcttccgctatctcggttgcccactcatctgcacggggtaatggcccctctttcttgcctgaatttgcccagaatacaggctctgcatcaatcagtttctgaataaacggatctttaagcagagcatgaaggacttctgaatgaactgacattcaacaatctctcccttccactatcaaaaactgccccgtgagaaacaagccactccaccacaggcagttctatcattattttttcatgagcgcgcgtcctgccagcttttctacaagagctggaaacagctgatacagcttagtgccggcattcattaaacgcggaagattgatctcccgctttttcgtaaaaattgcagctgtaatttgagctgccacgtcatcaggatcaagcatccagcggccgacatttttggcgtagtccccgcctttatcagcaatggaaaaaaagtccgtctgaatcgggcccgggttgactgttgtcacataaatgccggttcccgaaagctccatccgcaaagcgtttgagtaacctaacacggcatgtttggtcgcggaatacaggctagacttcggtgttgcgattttccccgcttgagaggcgatattgatgatatgtccctttttttgctcaagcatctgcggaagcaccgcttttgtacaggcgatcaggccgaagacattcacatcaaacatcgctttcatgtcatccaatgtagagtctaaaaccgtttcaaatataccgaagcctgcattgttaatcagtacatcaaccgagccgatctgatcgcggacccgggcgatatcctctaggcggccgacatccagaggaaaaatctcacactgtccgctccattcctcggttattttccttttgatttctatcaaacgatcctcgcgtctagccgacagaaggacatgggctccttcagccgcgcataagtatgcgattctttcaccaagccctcctgaagcgccggttatccaaatcctttttcccgctatatgtttcacccatttcacctcttcattgttttaaagtatgcggtatttccttcccaatatgacgtgatggcttcttcagcctccaacacatcaaggtgacctgccgtttctgacatcgttaaaaacaattccttttcatatacagcaggaaaaagctgctgacagacctgaaaagcggtcatcggcttttcatccagcatgcgacgcacatcctccgtcctgttcctctgcttgtcaaaacgcttctcaatcagcgcttgtacactggtgataggctcgccgtgaccaggaaatacgattgttggatcaagttgagacagccttcgcaatgaccgctgataatccactaaaggctttgacctgacgtcccccgctttcggcgcttccaaaatcggattagacgagctgtttgccagcagtagatcgccgccaagcatccttccgcttttttcatggaacagaacgatatgcgattcagcatgtccaggcatctccaacacggaccagccctcaagcccatctatgcccataccttctctgattgtttttgtcagagatctcgtacaggaaaatgcgtacgctgatcgaatcagcttttccgccttccccgtatcaaatggaacgcctaattcaggcagcagcttttgaaaaaaacgtttttgccaatccataaaggcttgatctcggctgatataaggttcgttgaatgtatgcccaatcacttcgatttcatctgaaaagacatcaagcaagcctgcatgatcagcatgatggtgagtcagtacaacctgctcgatatctgacattttcacatttacagcggcaagctgctcttgtagggctctggcagcctcttttgtattcggcccggcatcgataagtgtcagtgcatcaccttttacgaggtaaacgataacatcgccgacagcaaacggcgtcgggacgcggatcgcaattacatcttcagttgtcatcctttcgctccttgtcttcattcattattcatattttagctttttctcggtcttgtgtcattattgcagaatgagaacaaacctttttgaaaaagctattgacattagcttatccgccattgcataatgaacaacaaactaaaacgagaaccattggaacgctatgacgaggaatagtatacaaggcaatggcctaagagagcgatacccccggctgaaaggtgttgcggcccgcttgtttgtagaacctgccctcaagtcgcggttaggaaaacctaaacgtttcccgcgttacgggatttgagctgagcacaatttgtgctaatgagggtggtaccgcgaaccttttcgtcctttacgtgatgaaaaggttttttgttgttctgatagaaggaggatatcaatgaaaaagataggatttgtcggcgccgggtcaatggcagaagcaatgatcaacggcattttgcaaagcggcatcacaaaaccagaacatatctatattacaaatcgctcaaatgacgagcgtctgattgaattaaaggaaacgtacggcgtgcgtccatgcagagataaaaatgagtttttcactcacaccgatatcattatcctcgctttcaaaccgaaagacgcggcggaaagcatcgacagcatccggccgtatatcaaggaccagcttgtcatttcagtacttgcaggccttaccatcgaaaccattcagcattattttggcagaaagctcgcggtcattcgcgtcatgcctaatacatcagcggcaatcagaaaatcagcaaccggattttccgtaagcgctgaagcaagccagaatgatattagtgccgcaaaagctctattgaaaacaatcggtgatgcaacactggttgaggagcgagatcttgacgctgtcactgcaatcgcaggcagcggcccggcctatgtgtatcgttatattgaggcgatggaaaaagcggcacaaaaagtaggattagataaagaaacggcaaaagcactcattttgcagacaatggcaggggcaacagatatgctccttcaaagcggcaaacagccggaaaagctgcgtaaagaaatcaccagtcctgggggcactacagaggcaggtcttcgcgctttacaggactcccgctttgaagaagcaattattcactgtattgaagaaacagctaaacggagcgcagaaatcaaagaacagtttgccgttgccgccttagagagacattcttagatgtaagacaaaaacagaaggcactgtgccttctgttttttatttttcccgcagcagctggccggcagattctgattgctttaatagcgcggagatcgtaaatgaaagcaaatcgggaagcacttcaaaggaataaggcatatacaatctttccgtccatttatgcgggtctttaccagccggaccgacatttaaaaccggaacatataaagcctgatttttaccgcttggcaatgaatatcctctgttaaagagcggcatattgcttgtgtatgcatcaacctcctgtttttccagctgaagataactcaagtccgaaagtccggggaagtactgaacctcccgtaatgcaatgccgtatcgctcagccgcataatgctttatctgatctgctgtatttctgatcaattgatcatcctttgaagaaacagctggataaagcggcggactataaaacagaacgatgagcggcgcatcctccttacaaagcgaagcaagctcagaaacaattttcgtcgaaaaatccctgtctccaagctcccccctgttagcaaaggcataatttagagcccgctctgtttccgagatccccgcacgcttttttgcacgcgagaccagctcatcaaatgtcaaaacagtgacgtcccgctcaatcggctgaaatggctcaaattgttgaaaatcctgtgttttcttccgaacgttcgacatgatttcctccgccgcctgttctgctgttttaagcagcatctgatgcagctcactagctgagcgtttcattgacagcacattaaataatgtgacggctgtatgcggtgtctggactgaatatgcctctttcaagtccttttgcattaagtttaccggcggcggagtgacctcgccatcaaccttttcgcaataatcagcattcagttcaagcaaacggttaatctcagataccattaaatttgcgtttaggcctgaaaacggctctccaacatgtgtctcaatccccttgcagaaaaaacccgcaagcaccttgccaatgcttcctgtataaaaatattgctgctggtcgccgggaaatttttcaaacatcggttcggcattcaggcaagcggttaatgtgatatcatgctttttctccatctccttcaatgcaggaaccgcttcaatcatgcctcttgaattcacttcctcgtccggaaccgttatcaacagcagattgccctcaaaatgcccgttcattgccctctccagcatcgacagttgaatacaaagccccgctttcatatccatcgtccctcttccgaacagccagtctccgctttcggcatctcttctcacacgttccgggagcagctcttttttctctaaaaaggagctcaaaagctcagcaggcttgcaagccatatgtttaaattcgccgtaatcttctatgtcaacgacatcaaaatgactcagcagaagcactgtctttttgacattcttctttttgactagagccgtaagaaaagatctgccatcgtccatcggatgaagtgttacatcatcagggtgcttttgaaaatagggcttgtccttcaaaataaaataaagatactctgcaagcgctgcctcgccctttgaaccggtgatgctttcgtattgcacaagagaagttaaaagtgccagcaattcgtccttcgtctgccaattcattgattccgcccctcctatgaataaaaatgcttctatactgaaaaataaactgatttctcgtctattatacagaaatgtttgacaaaagcggttcatttgagcagtttatatgacgggaaagaaatgacttgatataatcaatctctaaaaaccttacgggaggcgaaagaaatggccagaaaattatttacacctattacaattaaagatatgacgttaaaaaaccgcattgtcatgtcgccaatgtgcatgtattcttctcatgaaaaggacggaaaattaacaccgttccacatggcacattacatatcgcgcgcaatcggccaggtcggactgattattgtagaggcgtcagcggttaaccctcaaggacgaatcactgaccaagacttaggcatttggagcgacgagcatattgaaggctttgcaaaactgactgagcaggtcaaagaacaaggttcaaaaatcggcattcagcttgcccatgccggacgtaaagctgagcttgaaggagatatcttcgctccatcggcgattgcgtttgacgaacaatcagcaacacctgtagaaatgtcagcagaaaaagtaaaagaaacagttcaggagttcaagcaagcggctgcccgcgcaaaagaagccggctttgatgtgattgaaattcatgcggcgcacggatatttaattcatgaatttttgtctccgctttccaaccatcgcacagatgaatacggcggctcacctgaaaaccgctatcgtttcttgagagagatcattgatgaagtcaaacaagtatgggacggtcctttatttgtccgtgtatctgcttctgactacactgacaaaggcttagacattgccgatcacatcggttttgcaaaatggatgaaggagcagggagttgacttaattgactgcagctcaggcgcccttgttcacgcagacattaacgtattccctggctatcaggtcagcttcgctgagaaaatccgtgaacaggcggacatggctactggtgccgtcggcatgattacagacggttcaatggctgaagaaattctgcaaaacggacgtgccgacctcatctttatcggcagagagcttttgcgggatccattctttgcaagaactgctgcgaaacagctcaatacagagattccggcccctgttcaatacgaaagaggctggtaatgccataagagatatcctgtagaggatatctctttttttatttttagagaaacgatcggctaaggttctccgtctccctagtagaaccaattagaggagatgactccaatgaaatcagcttggatggaaaagacatatacaattgacggatgtgcgtttcatacacagcaccggaaaggatcaagcggtgtaacgattgtctttgaggccggctatggtacttcttctgagacgtggaaaccattaatggcggacattgatgatgaatttggcattttcacatatgatcgggcaggcataggaaaaagcgggcaaagcagagctaaacgaacagctgatcaacaagtgaaagaattggagagtttgcttaaagcagctgatgtaaaacctccttatttggctgtttcacactcatacggagctgtcatcaccggtttatgggcctgcaaaaacaagtatgatattatcggcatggtccttcttgacccagctttaggcgattgcgctagctttacctttatacccgaagaaatgcacagatcacatacgagaaagatgatgcttgagggcacacatgcagagttttcaaaaagtctgcaggagctcaaaaagcggcaagtccacttaggaaacatgcctcttcttgtgttgtcatcaggagaacggactgagaaattcgctgctgaacaggagtggcaaaacttgcacagcagcatattgtctctatctaaccaaagcggctggattcaagctaaaaacagctcccacaacatccatcatgatgaacctcatatcgttcacttggctatttatgacgtatggtgcgcagcgtgccagcaggccgctcctctttaccaggcagtcaattaacgtaaaaaaagaccgggccgtaagggattcccggtcttttatattattttgtttcacggtgaagggtatatttctttaaacgcggtgaatattttttcagctccaaacggtctggattggtgcgtttattttttgttgtgatgtaatttcggtctcccgtttcagtgcaggctaaagtaacatttactctcataattaacatctccttataaagcgtaatgattacgttttattatacaacgtcatcacaaattgtcaaataagagctccgccttcagcctcgcgggacgtttacctctaagaaatcatatgccgccacgctattggggaaaacgtcaaccgcttctttttgaagctccaaagaagcatctccctgatatcttgcgctgatatgggttaaaatgagctgcttcgctcttgcttctttcgctgttacagccgcttgttccgttgtactgtgataataatcataagcaagtttacggtcttccttagcaaaggttgcttcatgaacaagcacatcacaatccctcgcaagctcttttagtttgtcacttactctcgtatcaccggagaacacaacagatcttccctttttaggaggctccagaaaatcattcccattgatgattcgtccgtcttcaagcgttaccgtttcgccttttttgattttctgatatacaggtccgggcgggatgttcatttcttttaatacgtcagccttcaaggaacccggtacgtctttttcctgcacacggtacccgaaggcttccactccatgaataacagataccgctgtgacaataaactgatcgtcctcaaacacgattccttcttcaatttcctggatcgcaagcggatatgtcaaatgggttttcgtgacggcaaggcttgtttcaataaacgccttgatccctttaggtccgtacactgtcagctcgtcctctccgccttgaaaggaacggctccccagaagccctggaagtccgtatacatgatcgccgtgcatgtgtgtaataaagattttctctattttacgaggtttaatcgttgtatgtaaaatttgatgctgtgtggcttccccgcagtcaaaaagccataccgaacgcctttcttcaagcaattttaatgccaccgacgttacatttctcgccttggcggggatgccggctcccgtccctaaaaaaagtaattccacgtttccttcctcctactagaaccagatacctacaagaatacaggatcaagctcaaaatgtgaatcttgcctctgaaaagaacaatcctttcgtgctagaaacattttttcagcattctgcttaaaaaagggcttaaatgtttgctttcgttgaattttagatttaaaatgaaggaaatatacggggtgtactaaaataaagcttcgaataaagtgaggtacttttagtgaaaacaaaccaacaaccaaaagcagtaattgtcatattcggtgcaactggagatttagcaaaacgaaaattgtatccgtctattcaccgtttatatcaaaacggacaaatcggagaagagtttgcagtggtaggagttggaagaagaccttggtctaatgaggatcttcgccaaactgttaaaacatccatttcctcatctgcagataagcatatagatgatttcacgtctcatttttactatcacccgtttgacgtgacaaaccctggttcttatcaagagctaaacgtattgcttaaccagctggaagatacatatcaaattcctaacaacagaatgttctacttggcaatggctcctgaattcttcggaacgattgcaaaaacattaaaatcagagggtgtaacagctacaaccggctggtcccgccttgtcatcgaaaaaccgttcggccatgatctgccaagcgcacaggcattgaataaagaaatccgcgaagcatttacggaagatcaaatttacagaatcgaccattatctaggcaaacaaatggttcagaacattgaagtgattcgatttgccaatgcgattttcgaaccgctttggacaaaccgctacatttcaaacattcaaatcacatctagcgaatcactaggcgttgaagaccgcgcaagatattacgaaaaatcaggcgcccttcgcgacatggtgcaaaaccatattatgcagatggttgcccttcttgcaatggagccgcctatcaaattgaacacagaagaaatccgcagcgaaaaagtgaaggtgctgagagcactgcgtcctattgcaaaagacgaagtggatgaatactttgtgcgcggacaatatcaagctggtgaaattgacggtgtaccggttcctgcttatacagatgaagataatgtcgctcctgactccaatacagaaacctttgttgccggcaagctcctgatcgacaacttcagatgggctggtgttccattctacatcagaaccggaaaacgaatgaaagaaaagtccacaaaaattgtcgttcaatttaaggacattccgatgaacctgtactacggtaatgaaaacaacatgaatccgaacttgcttgtcattcatattcagcctgacgaaggcattacgctttacttaaatgctaaaaagcttggcggagcagcacacgcacagccaatcaaactcgattattgcagcaattgcaatgacgagttgaacacccctgaagcatatgaaaaactcattcacgactgtcttcttggcgatgcaacaaactttgcacactgggatgaagttgccctttcttggagctttgtcgactctatttctgaaacatgggcagcaaacaaaaccttatctcctaactacgaatcaggctcaatgggaccgaaagtatctgatgatcttttggcgaaagacggcttacactggtggaatatataataagaagaaaaaagccgaaaatgtttacaagcattttcggcttttttgcagctgtcacagaggtatagcactctcattaataacaaaacccccgaagctctatagctttgggggtttctattgattacttcatccattcagtatggaagatgccttctttgtcagtacgctcatacgtatgagcgccaaagtagtcgcgctgtgcttggattaagtttgcaggcagtacggctgtgcggtagctgtcatagtaggctaatgcgcttgagaatgatggcaccggcacaccttgggcaactgcaagtgaaatcacttggcgaagcgctccttgatagctttctacaatattcttgaaatagctgtcaagaagcaggttgtcaagctcaggctcgcgatcgtaagcttctttgatcttctgaaggaatgccgcgcgaatgatgcaaccaccgcggaagatcatagcgatttcaccatatttcagatcccagttgtattcttcagaagcagctttcatttgggcaaatccttgcgcgtatgaacagattttactcatgaacaacgcttttctgaccgcttcaatcagctcttctttattttctgtaacaggcttcacttctggtcctgaaagaagtccgctcgctttcacacgctcttccttcatagctgagataaagcgtgcgaatacagattcagtaataatcggaagcggaacgcctaagtcaagtgcgctttggcttgtccattttcctgttcctttttgccctgctttatcaagaatcacatcaacaagcggcttgcctgtctcttcgtctttttttgtgaagatgtcagccgtaatctcaatcaggtagctatcaagctcacctttattccattcagcgaaaacttcatgaagctcatcagcagaaaggcccagcacctgtttcagaatgaaatatgattcagagatcagctgcatatctccgtattcaattccgttgtgcaccatttttacgtaatggccggcgccgtccggaccgatatatgtcgtacaaggttctccgtcaacttttgcagaaatggcttcaagaatcggttttacaagctcatgtgcttctttttgtccgccaggcatgatagaaggtcctttaagtgccccttcttctccgccggaaacgcctgttccgataaaatgaatgccgctttcagcgagttctttgttacggcgctgtgtatctttatagtatgtattaccgccgtcaattaaaatatcatccttctctagatgaggaagaagagattgaattgtcgcatctgttgcagttcccgctttaaccattaataagattttgcgcggtgtttccaaggattggacaaattcttcaatgctgtatgtgccaacaacattttttccttttgcctcctgtaaaaactcctcagttttactgcttgatctgttgtaaacagaaacagaaaatccccggctttcgatatttaaagccagatttttacccatgaccgcaagtccgataacgccgatttgttgttttgacatattctaacgtcccttctgcaaacgtttaatcattttaaaatttaaattaaaataaaatgatatttataataaagaaattaccatacattcaccctttttttcaagcgattcagcttttcttttcatcatgaaaaaaatctttattaaagcttgttccctttgttttgctctcctctttttttaacgttgccccttttctgatcagtttggtaccgtactttttattcagcttttccatcatctgctgaataggctcatccttcgcatcttcattaaagctgaacaaatcgagctgtttataggcctgctctttttctactaaatccgttccggtaatgccaagcagcctgacaggatttttattccagtgtttaaaaaagaggtgctccgcttctttcaaaatgtcatttttttgatcaatcgggtttctcagcgtggtgcttcttgtgatggttttccaatccgcatatctaatcataataaaaagcttcgaagccatgacttccttgcgctgtaaacgggcactcacagaagcagcaagctttctaaagacgcctaacagctcttcttcatcactggaatcatgggaaagtgtcgatgagttgccgacgcttttaaattcgtaaatgcgctccgggtcaaccggcgcatggtgaatgccatttgctttatttttaaggcgcggaccgtttatgccaagcaggcgtttcagggagtgttcatcagctgcagctagctctccgattgtatggatgccgagtcccttcagtttttccgctgtctttttgccgactccgtgcatctctccaacaggaagcggccacaggatatcaggcacttgcctctttcttaaaatcgtaattccaagcggttttttcatatcagacgccatcttagcgagaaatttattcggtgcgatccctatgcttgacgggagcagcagctctttttgcagcctgctttggatttcttttgccgtctctagcgcgcggctgctgtatggtgtatcggtcatgtccatatagccttcgtcgatggagacaggctccaccaggtcagtatattcacgaagaatggtaaacatcgctcgtgaagagtttctatagcggtcaaagttcggcggaagaacgatgagctcagggcaatggcgcttcgcttgccaaaccggcatcgttgttttgacgccgcgcgctcttgcttcgtagctgcatgttaccacaatgccctttcgctcctttacgtttccggcaactgcgaccggctttccccggagagccggatcatatgccatttcaaccgacgcataaaagctattcatatcaatatggaaaataattcggctctttcccggcataaacaaatctccttttcggtcattagacaacagcttgtacatatagtaaaatgaagctattgaatggatgtgatgacaatgtttgtggaatcgataaatgacgttttattcttagtcgattttttcacaattattcttcctgctctgacggcaatcgggattgcattcctcttacgagagtgccgtgcgggcgagcaatggaaatcaaaacgaacagatgaacatcagacggtctttcacattaaccgaacagactttcttattattatatatcatcgcattacaacttggatacgtaaagtcttccgcatgaattcgcctgtgaacgatgaggaagacgccggttctcttcttttataaaccgcatttataaaaaggaggagaacaaaattgttaaaaacatatcaaaaacttttggctatgggtatctttttaatcgtattatgctcgggcaatgctgcatttgcagcgactaatcaggtgggaggcctcagcaacgtaggttttttccacgattatttaatcgaaccgttttccgctctgcttaagggtgttgccgggctgtttcacggagaatacggactctctattatcctcgtaaccattattgtgcgtatggttgtactgcctttgtttgttaatcagttcaaaaaacaacgcgtgttccaagagaaaatggccgttattaaacctcaggttgacagcattcaggccaaattgaaaaaaacgaaggaccctgaaaaacaaaaagagctgcaaatggaaatgatgaagctgtatcaagagaacaacatcaatccgcttgctatgggatgcctcccaatgctgattcagtttcctattgtgattgggttttattacgcgattcgctctacacctgaaattgcgtcacactcgtttttatggttcagtttaggacaatctgacattctcgtgtctcttagcgcgggagcaatgtactttatccaggcctatgtcgctcaaaaactgagcgcgaaatattccgctgtcccgcaaaaccctgcggcacagcaatccgcaaaattgatggtgttcatcttccctgtgatgatgacgattttctcgcttaatgttccggcagcccttccgctgtactggtttacaagcggactgtttttgacagtgcaaaacatcgtccttcagatgacgcatcataaaagtaaaaaaacagccgctcttactgagtcggtgaaataaaaaagcaaccccgcgcgaaaagccggggttgttttttgttacttgcaaagcataccgcgccaaacagtcttgtttatcatagctgaagcagaaatggccatccaaaaaatagccgtatcgtttaaaaagaaggaaatagggaatacctttactcacctccaaacgaaaggagcatatacgttgacggaacactttcagcaaaaaaacatttctgtacctgatggaatctggatcatgagacaaacctggaatgatgtcttatttgctcactggcctgttgatgtttctatccttcgcgctttggtaccgtccgttttagaattagatacatataacgggcaagcttggatcagcatgcttccctttatgctcacgaacctaagggcgcgttatcttcctgccattcccggtgcgcgtgcatttcctgagcttaacctccgcacctatgtcacgtataaaggcaagcccggcatttatttttttagcttagatgccgatcatcgtctggcggtccttggcgctcgcacattctttcatctgccttatttttacgcggatatgaagtccgaaaaaaacggtgatgccattgactatgtcagcaagcggaaaaatgacaaagaagcagcattccacgccgcataccggcccatttcagcgccttttacagcagaaaaggattcgctcgattactggctgacagaacggtatagactctatactaccaatcaaaacaaactctattacgaagacatccatcatcatccatggctgctgcaaaacgccgaagcggaaatttcagtcaatacggtgactgatgctcacggcattacattgccagagtcagaccccttgcttcattacgctaaaaaacaggatgtgttattttggccgcttaggaaatggagctaaaaaaacccgatgcgggaaatcgcactcgggttttctttttttattttgccgcctcttcaataatggcaacaaccatttctgccgttttaacgagctcttcgatcggcattttttcattttttgtatggatttgctcataaccgacagcaagattgaccgtcgggatgccatgaccagcgattacgttcgcgtcgcttccgccgccgctcgtttgcagctcgcttggacgtccgattttagcagccgcttttttcgcgatttcaacaacttggtcgccgtcttgatatttaaagcccggatacataacctcaatttcgacttctgcgcgtccgcccatatcagcagctgcctcttcaaaagcagctttcattttttgaacctgagcttccattttctcaggaactaaagagcgcgcttcagcaagaatatgaacttcgtcgcacacaatgtttgtttgtgtgccgccttcaaaccggccgatattagctgttgtttcttcatcgatacggcccaatggcatttttgaaatggctttgctagcgattgtaatcgctgaaatgcctttttcaggttcaaccccggcgtgagcggttttcccgaaaattgccgctcttaccttcgcctgtgtcggcgcggccacaatgatatttccgacttttccgtctgaatcaagagcatagccgtaggatgcagtgatcatagaacggtcaagcgccttcgctccgatcagacccgattcttcccctactgtgatgatgaattcaatcgtgccgcgttcaatgttttcttctttcagcaccttaatcgcctcaaacattgcagccaatcccgctttatcatcagcgcctaaaatcgtcgtgccgtcagttttgacgtaaccgttctctacaactggttttacgccgtttccgggtacaactgtgtccatatgagatgtaaaatagatcgtatctgtttgttttgtcccttttagcgtgcaaatcaggttaccggctccgtggcccgtgatatccattgtatcgtcttctttaacgtccacacctaaatcagaaaattttcgtttcagcactttgcagatttcagcttcgtgctttgtttctgagtcaatttggacaagctctaaaaattcttccagcaggcgtttttcattcaccatttgtaagtccctccatattaaagcggtatgttaccgtgcttttttttcggtctctcttctgtcttatgtgcaagcatatgaaaagcttgaatcagttttccccttgattcttccggcaaaatgatgtcatcgaccattccacaagctgccgctttgtatgggccggcgttttgctttttgtattcagctgttttttcgcgtttcgtcttttgcgggtcagctgaagctttgatttccttttcatacaaaatcgatgccgcaccttctggacccatcactgcgatttcagcattcggccatgcaaacacaaggtccgctccgatcgctttgctgttcatggccacataggcgcctccgtacgcttttctaatgatgagtgtgacttttgggacagtcgcttcagcataagcaaacaataattttgctccatgcctgatgattccattgtgctcttgctgaatacccggcagaaaccccgggacatcttcgacagtcaatagcgggatatcaaatgcgtcacaaaaacggatgaaccttgctgctttatcagcagcgtcaatcgtcaggcttcccgccagatgcttcggctggctcgccacgatgccgattgctttttcacccagccttgcaaacccaatgacaatgttcttcgcaaaaaatggctgaatctcaaaaaaagattgcgggtcagccagctccctaatcaccttccgaacatcataagcctttgtcgtatcagcagggacaagacggtttaataacggtctggacgcctctttctctggcttcggctctgttgtccggccattcagcggcaaataagacagcagttttctcacccctgtcagaacctccttctccgtatgcccggaaaagtgggcgtttccgctgacggcattatgtatccccgctccgcctaagctctccgcatcaacctgttcccctgtcactttttcaatcaccttcgggccggtaataaacatccggccggtctgttcagccataaatataaaatctgtgagtgccggagaatatacagcgcctccagcgcacggccctaaaataaccgatatttgcggaatgactccggaatataagacgtttcggtaaaatatgtgaccgtatccatctaatgataacacaccctcttgaattctcgcaccacctgagtcattcagcccgataatcggcgccttattttttgctgccagatccatcaaagcgcagattttcctggcatgggtttcgccaagcgcccctccgtacactgtgaagtcttgcgcaaatacataaactgagcggccgtcaattgtgccataccctgtcacgaccccatcccctaacatgcgctgttctcttgttaacacttgactttccatgaaggggtgtaattcgataaagctgtcctgatctagaagaaatatgatcctttcccgagcagtgtgcttgcccttttgccgctgctgagccagcttttcccgtcctccgccttcttctgcctgcttgcgtttcgtgtataaatgatccatgtgttcattcatgctcattgtgttggtctcctttcggttcacaaagctctacaagaacaccgtttgtttcccgaggggaaataaacgcgatctttttcccgttcgctccctgtcttggaaacctgtcaatcaattgaacatgctggtcagacaatgcttgaagctgttcagataggccgttgcacaaaaacgcaatatgatgcagtccctgccctttcttctccaaaaataaatggacggggctgtcagctgtcaacggctctatcagctcaagtttgacgctaccagcttgaaaaaaagcaacattcaccttttgctcttcaaccgtttcttgatgaagaaatgcaagccccaatacattttcataaaagcttcttgcatcttttatcgaaaaaacggctatcccgatatggtcaagcctgttcattttcatccctgctttcgctaatagatatcgcttgtccgcccattcaaaacacgctaaaatatagacagattgtttaaggagtgaaaatcatgtctcaaaaactgatgaaaagcgttttgatcgtgattttgggagtttttattctttcaactgtactctcaggaatcgtcatgtttctataacgataaaaaagcaggcgccttattcaatgggaatatcctgcttttttatcagagctttatgctcgatggcaatctcctcaaaagagcggttgtcgtccgtgatcagcactctcgttcctactggtatcgtttgaaacaaatgaacaacctcatcgttatgcatacgtatacagccgttagacacaaattttcctactgattcctctcggtttgtcccatgaattccataaatccgcccgtccgttcctttcgcgtcaaatccgatccatctggccccaagcgggttatcaggagatcccccttcaatatttttctttctgtagtaaggattttccgcttttaccgttaccgaaaactctccttcaggcgtcaaatcatctgtttttccagtcgccacactatacacgccttctactttgttgtcgagaataacagcaagttcatttgttcgcttgttgacaataacatacggatcacctggcagcggattttcgccgagcggccaaatcggtgaaatcatcattaaaatcgaacataagaaaaaacgcataagctcctcctttttcattaggttgaccaatgaaggaagagctcatgcgaatcatccgagtgatttttgcgcttttattcctttaaaataacttttaatcactaaatattgttccatttcgccgagaagatggaagagagcggccctcgcttcaaattcctctctagtcgcaggaagcggcatctcctcaaattcttttctcatgtcagcaagtcttttcagaaatttgtacgctgtattcccagggtgtatcgcctcccgcaaatcatgaataaattcagcgatcatttttccctgatctaccgtgatggagatcgatgtcactttagggagaaggcgttcgataatttcaaattgcttttctctcattttaaaataatgataatgcagattttcgtaacgcaaaatgtggttttgcacatctcgatatgccaggtttttagcctccgtaatgagctggtgcgtttccggaatttcttttcctgaccaatcttgctcaccagttaacaaataccgttcgatttctgcaaaaatgacagcaaagttatcctctatctttttgcggtaggcaatcagtttccggtcaagactaggcatatacaagttcatcaatagagcgacgccgatgccaaccgtaatcagctgaacttcattccagatgaaagcaagcgtaatgccgccggacatgtataaatgaaggataataacggaactggtgacgataccctcgttaatttttaacagaaccgttatcggaatgaatatcaaaagaagcgctccgatcacaaacgggtggtagccaataagctcaaaaaagagataagaaaaaacaattgccagacagcatgccgcaaagcgggcccatgaggcctgaagcgaccgtttttgtgtgatttgtatgcacaaaatggtgatgattcctgctgatgcgaagttttgcaaatgcaataactggcttatataaatagccaaagctgttccaagcgcggtctttattgtgcggtaaccaattttaaacatgtcggactccatttctatttgtttcttcaataaaaaagaagaggcggccagccttcttcttttttatattctataatattttctctaaaaagtcctgcgctcttttggattttggcgacataaaaaattccttcggattgccgtcttcgacaatcattccttggtccataaacagcacacggtctgccacttcttttgcgaagcccatttcatgtgtgacaatcaccatggtcatgccggtttcgaccagctctttcatcacctgtagcacttctttgaccatctctggatcaagggcggaggtcggctcgtcaaacagcatgatgtccggattcatcgcaagagccctggcaatcgcgacacgctgtttttgtccgccagacaaacggtttggatagtcatttcgcttttcaaacaaaccgactttgcggagcaggtcctcagctttctcctgtgcagcctgttttgattctttttttacattgacaggcgcgtacatgatgttttcgagaaccgttttgtgcggaaagagatgaaaatgctgaaaaaccatcccgatgttttcccggacctttaatgtgttggttttcggcttcgtaatctctgtgtcttttattgtaatggttccgccgttaggcttttccaacaggtttaaacagcgtaagaacgttgatttgcctgagcctgaaggaccgatcacggcaacaacctcaccctcagcgattgttgttgaaatgttttttaatacttcgtgtttcccaaatgattttgacagcttttcaaccttaatcattggatttcagcttcctttctacagccttgccgataaacgttaaaatcaggacaagcacataataaatcaatcccgcgataatgagcggctcaaggtaattgtaagtggcggcgccagcttgatatgcgcgtctcatgacatcaccaagcccgatgacggtgacgatcgccgattcttttgttaacgtaattaattcattcacaattgcaggtgatatatttttgaaggcctgcggcagcagcagatccttcatcatttttccatacgggacaccgagtgcaacagcagcttctttttgccctttatcaatggcattgattccggctctgataatttccgatacataagcggcggaattcaaagacaatgcgacaaccgcagcccaaaactggtcaatttgaaatccgagcagctgaggaaggccaaaatagacaatcataagctgcagcactaaaggcgtgcctcggaacactgatgtataaaaatcagcgatccagataaacgggcggaatgtgctgatcttgcataagcttagcacaataccgagtataagtccgataatagcagatacaacaacaatttttaatgtaattgccaagccttctaatataaaaggaatttgggggatcgttgctgaaaaatccaaattcatagcctttgtctccttttcttacaggaaaaaagtttcctattcaataaaaaggctcaacgaaaaagttgagccgcttttttttacttctcgccagtgaaccattttttcttcaatttctcaagctctccgttatcttccatttccttgagcgctttattgaatttgtctgtcagttcactgtcctttctgaaagcaattgctgaaccggcttcttccgctttcgcctcaggaatcacaaagccttgcaggtcatcatttgatttgaaatacccttctgcaacaatgtcttcaataatcgcggcatcgaaacggtcagatttgatttcctgcaccaaatcagaaattctgttgcggtcttctgttttaaaaccatattccggagaaagctctttccccttctcttcctgaatagagccaagctgaacgccaactgtttttcctttcaggtctttcaaagattgaatgccgctgtcttttttgctgacaatcatatggttcgctgtgtaatacacatcggaaaaatcaacttgttttttacgctcaggcgttggtgtcattcctgacagaacgagatccacctgttttgatttaagcgctgtaattaagctgttgaagtccatatcctgcacttcaatttcatagcctgccttctttgccagagcttttgccagctctacatcaaagccgacaatattatctccttctttatattcaaacggtttgtaatccgccgaagtacccataattaattttttctttccgctttctgaacctgaattgcttgagccgcacgcagttaatgcaaaggtgatgcaagcagctacaagtaataagagccattttttcatgatccatttcccccgtattcattacttttggtgtatttgaatatttattcgttaatttgtattttaaacagtttctcatttttatgcaatactatttttaaaaattatctttaagcttatctttccagtgatctcttctgatattactagataaaaattaaatcgctgtacaatccgattgaataatcccttaatatttattcatatatccttagaaatttatgcacaaaaaaacccgggctgctttgagcatccgggttgttcgtcttatacttcttcacaatattcttcaaaggcttcctgcagctttgccactacggccatcggctcatggccttcaatttcatgacgctctaccattttcatgatctttccgtctttcaaaatcgcaaaggacggagaagatggcggataaccttcaaaatagtcacgcgcacgcgctgtcgcttctttatcctgtccggcaaaaacggtgacgagctgatcaggtcttttatcatagtgaacggaatggtaggctgccggtcttgcaattcctccggcgcatccgcaaacagagtttaccatgacgagcgtcgttccttttttcgtaagtgcctcatccacctcttcggctgttttaagctcggtgtatccggcagctgttatttcttgtctcgcttggcggacaatatcattcataaataaattaaagtccatgttcaatgaagacctctcctttttcatcatctgttcttatgatagcaaggaaacgtccatatcggcaaatgactttgcttcgccgtgcactttttttgctcttcgtttactgcttacagaaaaaggggattatataactagaagtaaaataaaggagcagttgtatatgagccacaggaaagcgttactgattcataacggaaatgccggcaacaaaaatatagaaaaagcacttggtgctgtggtgccggttttatctcaccatttagatgaggtaattattaaacagacaaagaaaaaggatgatgcgtatcatttttgccgatccattgatgattctgtcgacaccgtcttcattctcggcggcgacggcacgatccatcaatgcataaatgctatcagcgctctagaaagaaaacccgcggtcggaattttgcccggcggcacgtgcaacgacttttcaagagtgcttggcatccctcaaaatcttgcaaaggctgcggaagcacttatgtcaggaaaaaaaaccagcgtagacgtatgtcagatgaatgaccgttattttttgaatttctgggggatcggcttaattgcagaaacgtcgaatcaaatcaacgaaacggaaaaagcattattgggaaaaatcagctattttacaagtgccttgcgaaccgtctcatccgctgcatcgtttccgatgacattaaaaattgatggagaagaaattaaagaagaagccgttatgctgcttgtgatgaatggccaatatattggaacgaatcgaattcctctccccgatgccagtattgaagatggcttacttgatgttctcatatgccgcaataccaacctcaccgcgttgcgggagctgatgagcatggaacagggttcaattgatcgttttaccggagagttgtcctatgtccaggcttcccgtatcgagattgaaacagacactgccaaaaaggcggatatggatggagaagtttatacacatacacccgcagtcattcaggtcctgccgcagcatatcgacatgcttgttcccgcaaatgaataactgtcatagggctttagaaagattttgcaaatccgttgactctcccctaggaggaggtcttacagtataagggatacacacttgaaaaaggggaagtcatatggagaagaaaaatattaccttaactatattattaaccaatttatttattgcttttttggggatcgggcttgtgattccagtaacgccgaccattatgaatgaattgcatttatcggggaccgcggtcggctatatggttgcctgcttcgctattacacagctcattgtctcaccaatagccggacgatgggttgatcgcttcgggcgcaagatcatgatcataatcggcctgttgttctttagtgtgtcggagtttttgttcggcattggaaaaacagttgagatgttatttatctcccgtatgctgggcggtatcagcgcagccttcattatgcccggggtcacggcttttattgcagatatcacgaccattaaaacacggccaaaagcgctcggttatatgtcagccgctatttcaacaggatttattatcggccccggcatcgggggatttttagcagaagtccattcccggctgccttttttctttgcggcagcttttgcactgttagcagccattttatcaatcctcacgctgcgcgagccggaacgaaaccctgaaaatcaggaaataaaaggacagaagacaggctttaaacgaatttttgcccccatgtatttcatagcttttctcattatcttaatttcgtcttttggtttagcatcatttgaatctttatttgcattattcgtggatcataaattcggatttacggccagcgacattgccattatgattacaggaggagcgattgttggcgccattacgcaagtcgtcttattcgaccgcttcacaagatggtttggcgaaatccatttaattcggtacagcttaattctctctacgagtctggtattcttgctgacaacagtacattcatatgttgcgattctgttggtgacagtcaccgtatttgtcggatttgatctcatgcggcctgcggtaacgacttacctgtcaaagattgcgggaaatgaacaggggtttgccggcggtatgaattcaatgtttacaagtatcggcaatgtattcgggcctattatcggcggaatgctgttcgatattgatgtaaactatcccttctactttgcaacggtcaccttagccatagggattgcactgaccattgcttggaaagcgcctgcacatcttaaagccagcacgtgataagaagcgcattctttgtgtactgcaaagatgcgcttcttctttatactgatgatagaaggagtgatggcatgaaggaatcgtattactcaattggggaagtatcaaaactggcaaacgtgtcgataaaagcgctccgttattacgataaaattgatttatttaaacccgcctacgtcgacccggataccagctaccgctattatacagattctcagctcattcatctggatttgatcaaatcattgaaatatatcggcacacctttagaagagatgaaaaaagcacaggacttagagatggaagaactgtttgctttttataccgagcaggagaggcaaatcagggagaaattagactttttatcagcactggagcagaccatttcattggtgaaaaagcggatgaaacggcagatggaatatcccgcgctcggtgaggtgtttgttttagatgaagaagaaatacggatcattcagacagaggcagaaggaatcgggcctgaaaacgtgctcaacgcctcctacagcaaattaaaaaaatttatcgagtcagcagatggatttacgaacaatagctacggcgctactttctcttttcagccctacaccagcattgatgaaatgacttaccgtcatattttcacgcctgtattgacgaataaacagatttcatcaattacgtcggatatggaaatcacaacaatccctaaagggaggtatgcgtgtatcgcgtataatttttcgcctgaacattattttctcaacttacagaagcttatcaaatatatcgcggaccgccaattaacagttgtcagtgatgtatacgagttaatcataccgattcattactccccgaaaaaacaagaagaatatcgagtcgaaatgaaaatacggatcgctgaataataaagcatagaaaaagagcattttttgaaacaaaacttcaaaaaatgctctttttgcttatttagtaaacagatgtcttctcgtcaatcgattctaaaatttgtttcactcgtccgaggaatcgtccgcacacgagaccgtcaagcactctgtgatctaatgacaggcacagattaaccatgtctctgacagcaatcatgccattgtccatgacaaccgggcgtttgacgatggattctacttgaagaatcgcagcctgagggtagttgataatgcccattgactgaacagagccgaacgaacctgtgttgttgacggtaaacgtgcctccctgcatgtcatctgcagtgagttttccgtctcttacttttttagctaggccggtaatgtctttcgcaatgcctttaattgttttttcatcagcgtttttaatcaccggaacaaataaagaatcctctgtggcaactgcaattgaaatattgatatcctttttctgaataattttgtcccccgcccacatgctattcatttgcgggaattcttttaacgcctgagcgaccgcttttacaaaaaaggcgaagaacgttaaattaaagccttctgtcttcttaaaggaatcttttatactgttgcgatatgcaaccatatttgtgacgtcgacttccatcatcgtccaagcatgcggaatttctgttttgcttcgcttcatattggaagcaattgcttttcttacacctgtgacagggatttctttatcaccggctgcagacgcaggatatgacgtctcttcttttggctcaggttttgatgcagacttcggtgcaggagctgctgttttcggctcctcaggattctgttcttgcacgccgcctgtttcaattaagcgctgaatatcttttcgtgtgatgcgcccgccggcacctgttcctgttacttgttcaagatcaatgctgtgctctccggccaaacggagtacagctggcgagtagcgctttttattgggctgatcagctgcttcggtactttttgcagcaggcgtctcagcggcttttgaagcagctggctgttcttgtttttgttcagccggattcgcgccttctgtttcaattttgcaaatcacttctccgacttgcagggtttggccttcttctcccacaagctctgttatcgtaccagtaaaagaagacggaacctctgcatttaccttatctgtcatgacttccgcgatcggatcgtatttgttcactttatcaccgggggcgacaagccatttgctgatcgtcccctctgttacgctttctccaagctgcggcatcgtcatttgttcaattgccatgattgtatcctcccttacgtctttaaaactccgctaattctctcatcgccgcttccactttatcagggttgaccataaagtatttttccattgtcggcgcataaggcatagccggaatatcaggacctgcaagccgtttgatcggcgcgtctaagtcgaacagacaatgctcggatataattgcggctacttcgctcatgatgctgccttcttttgtatcttctgtgaccaaaagaacctttccagttttggacgcagcttcgataatcgcttctttatcaagcgggtaaactgttcttaaatccaccacatgcgctgaaatgccatctttttcgagacgttctgcagcttgtaaggcaaagtggacacacagaccgtatgtgatcactgtgatgtcgtcgccttcccgttttacgtcagccttgccgattggcaggacataatcatcagccggaacctctccctttatcagacggtacgcccgcttgtgctcaaaaaacagcacggggtcttcgtcacgaactgcggcttttaagagccctttcgcgtcatatggtgttgatggcatgacaattttcagtccgggctggttggcgaaaattgcttcgactgattgagaatgatacaaggctccgtgcacgcctccgccgtatggcgctctgacgacaatcggacaactccagtcattgttgctgcggtagcgaattttagctgcttcagaaataatttggttgactgccggcataatgaaatcagcaaactgcatttcagcaatcggtctcattccgtacattgccgctccgataccgactcctgcgatcgcagattcagcaagcggcgtatccatcacgcgctcttccccaaattgttcatagagtccggctgtcgctttaaacacaccgccttttcttcctacatcttccccaaggacgaagacgcgagaatctcgttccatttcttctttcatcgccaaattgattgcatcaatatatgacattactgacatttgttcttcctccctacttcgcatacacataatcaagcgctgactcaggagctgcataaggggcgttctccgcttcatccgtcgcttcatttacgattgccataatttcatccagcatggtttgttctatctcatcggacagcaggcctgtttcctttaagtaagcttgataagtaagcaggggatcactttttttcgcttcctctacttcttcacgccctctgtagctgctgtcatcgtcatcactggaatgtggtgtaaggcggtaagaaatcgtttcaattaatgtcgggccttctcctctgcgtgccctttcgcgtgcttctttaaccgcttgataaacttccagcgggtcatttccattcacagttacgccaggcatcccatagcctatggcacggtcggaaatgttctcacatgcgacttgcttatcgtaaggcactgagattgcgtatttgttgttttcacacataaaaataaccggcagcttatggacagcggcaaagtttgccccttcatggaaatcgccttggtttgaagacccttccccgaatgtaacaaaggctgcgatatcctttttctccatacgtcccgcaagcgcaataccgactgcgtgcggcacttgcgttgtaaccggagatgatcccgtcacaatgcggtttttcttttgtccgaaatgtcctggcatctggcggcctcctgagttcggatctgctgcttttgcaaacccggacatcattaagtcctttgctgtcatgccaaacgcgagcacgacacccatgtctctgtagtacggcaatacataatccatttcacggtcaagtgcgaaagccgctcctacctgtgctgcttcctgtccttgacaagagattacaaatggaattttgccagaacggtttaacagccacattctttcatcgatttttcttgctaacagcatggttctatacatatcaacggcttcctgatcagtcagccctagtgcttgatgtcggtttatactcattcaagcccctcctttatgcttttaaaaatgaatggctttgccatctgcggcaagcgctgcttctccaattgcttcagaaagcgttggatgcgggtgaatcgtttgcccgacctcccacggcgttgcgtccagcactttggcaagacccgcttcagaaatcatgtcggtgacatgcgggccgatcatatgaacgccgagaatatcatctgtatctcggtccgccacgattttgacaaaaccgtcgctttcaccgtatacaagcgcttttccaatcgccataaatgggaacttgccgattttgacattatgcccgttcgcctttgcttcgtcttctgttaagccgacactggcagcttcagggcttgagtaaatgcacttcggcacaagcgtcggatcaagcggatgcggattgagacctgcaaaatgctcaacagcaataattccctcatgtgaagcaacgtgagctaactgcaggccaccgattacgtctccgattgcataaatatgagattccttcgtttggcagctttcattgactgaaatcatgccattttcagtaacaatatcggtgttctctaggccgatgccttcgatatttgcctgtctgccgatggaaacaagcattttctcagcagagtaggtaacggtttctccgtctttttccgcttgtatgctgatatcgtctgatgtttttgtcattgtgtcaggcagcacttttgcccctgttatgaactggatgccttttttcttaagaagactttccatttcttttgaaatctctagatcttcagtcggcaatatgcgatccgcgtattcaataaccgttaccttcacaccaaaatcatgaagcatagacgcccattcgataccgataacccctccgccgacaatgatgattgattgtggcagctcctccatttggagcgcctcatctgaagtcagtacagacttaccgtccgcttcaagacccggaagcattctcggtcttgatcctgttgcaatgatcacttgtttcgggatcagcatgtcattttcttcgccatttccccgctcaacagaaattgttcccggcagcggagagaagattgacggtccaagaatacgtccatatccggtgtacacgtcaatttttccttttttcattaaatgatttacacccgctgcaagcttatcaacaacggcttgcttacgctgctgcactttttcaaagttgagggacacgccagccgtttccaccccgaattgatcggcttcacgagctgtccggtatacctctgcgcttctaagcagcgctttactcgggatacagcctttatgcagacatgttcctccgagtttttccttttccacaacggctgtttttaagccgagctgagcggctctgatggccgcaacataaccgccggtaccgccgcccagaatgactacgtcatactcagttgccatggtgactcactcctgtctgtctattcaatacgatattgtttggattgctcttcgccctgcaatactctgagcgccccttgggcaagagactgcagttcattttcacccggatagactaaaacgtctgaaatccaatctatgtatgatctgatagcagaaacaaagcttttgccgtacgcaaggcctcccgtcagcacaatcgcttcaacttctccttttaacgctgcgctggctgccccgatttcctttgctacctgatatgccatggcatcataaatgaagcgggctttttcatcgcccccttgaatcatctgttccacttttactgcatcatttgtaccgagatagcctaaaagtccgccggtgccaacaagctttttcatgatttcttcttttgtatattcccctgaaaaacatagatcaacaagatctcccgcaggcactgttcctgctcgttcaggactgaatggtccctcgccgtgcaggccgttattgacatctaccactcgcccgcggtcatggacgccaattgtaatacctccgcccatatgggtaataatcattttcatgttctcatatcgtttgccaagagaggctgccgctttacgagcgacagctttttggtttaacgcatggaaaatgcttttccgttcaatttcaggcatgcctgaaactttcgcaagcactgacatttcgtctacgacaacagggtcgacgatatacgaagggatattcaggccgtcagcgatttcccgcgcgataatgccgccgagattagaagcatgctgaccggcgtaaccgcttttcaagtcctcaatcatgtcatcattcactacgtaggtcccgccttcaattggccggagaaggccgcctcttgcgcagactgcatcaaacttcgagatattgattccctgttcatgaagcgtttcgagaatatggtttttacgaaattcatactgatcaataattcggtcaaatcgctgcagctcttctatgttgtgtctcaatgttttttcaaaaatgcttctttcattatgaaaaacaccgattttcgttgaagttgagcctggattaattgtgagaatgcgtttttcgtcatgtagcactttcataacctccagatcaatttcttaacgtctgcttaatacactgtggccgttttgcaaaaactggcttcttgagcggcgcatgcgttcaatccgttcctctgccaagcggtcagccgctaaatatgcaggaatgccgtcacgctgagaaatctcaagtacacgctcgatattgccgtaaatgccttcaacttttttcaatgcacgttctgcattatagccgtaaagctcatctgccacgttgatgacaccgcccgcgttaatcacgtaatccggtgcataaacgatgcccatttcgtgaatttgatcaccatggcgtgtctcttttaattggttgttagccgcacctgcgatcactttcgccttcagctgtttaatggtgtcgtcgttaatagtcgcaccaagggcacatggcgcataaatatcgcagtcttgtgaataaatatcatcaggatctaccgcccgggcgccaaaatcttcaactgcacgctgtacagattgtttgttgatatccgtaacgattaagtttgctccttcttcatgcaggtggcggcaaaggttataggctacgttcccaacaccctgtacagcaatggtttttccttcaagagagtcggttccgaaagcagctttagctgctgccttcattcctctgtacaccccgtacgctgtgactggggacggatttccagaagagccgaaagcaggagaaatccctgtaacgtagtctgtttcatcatgaatgatatccatatcctcgaccgttgtacccacatcttcagccgtgatgtatctgccattcagcccttgaatatagcggccaaacgcgcggaacatttcttcatttttgtctttgcgcggatcgccgataatgactgtttttccgccgccaaggtttaagcctgccgccgcgttcttataggtcatgcctctagccaatctgagcgcatcttcaattgccgcttcttcattttcatatgtccacattctcgttccgccaagcgccggaccaagcgttgtatcatgaatcgcgataatcgcttttaatccagattgttcatcctggcagaataccaattgttcgtaatcgtatttctccatatatttaaaaagttccatgttcgttcctcctaatgtgtgtattcttcagatgcgcatattgccagcgcaatggaatacagtttattttcagcagagtccgctctgcttgttaaagcaatcggtgcttttgctcctgtaatgacagccgccacgctggccttggcaaaataaatcagtgatttatataaaatattgccggcctcaattgttgggacgagaaggatatctgcgttgcccgctacgtctcccgaaatttttttctgagccgcggcaatttgtgaaactgcgttatccaaagcaagcggtccatcaacaatgcagcctttgatctggccccttttgtacatttgagctagagcagctgcattcacggttgcttccatttttgggttcaccgtttcgaccgctgcaagagcagctgcttttggcatattgttccccactgcatgggccacatgaacggcattttgcaaaatctgccgaagctcttccagcgaaggagcaatattcattgccgaatctgtcacaaacatcagccggtcaaaatccggtatatcgaatacagccacgtgagaaaggacacttgctgaccgaagcccctcctgtctgttcaataccgctttaagcaaaacagaagtcggcacattgcctttcattaaaacgtccgctgttttatgatgcacagcacgaaccgctaatttcgccgattcctcaggagtatcggcatggacgatttccacttgatgcccttgcatggatgatgtcagctcgttcagttttgtgctgtcgcccgttaacaagaaacgggcagataggtgctcggctgccagctttacagcccggatcacttcctcatcctcagcatgagcaaccgcaatggtcttatttttgtgtatcgacgctttgccgattaaatctttcagcttcatctgttaccacctttcttgtttcgactccgccttttattatgcaagttccatgccagctcttaagggtgctgtcataccaggtatattgaaacattcgtgcagatgtttgcgtttattctgcaaattattgcatgccttcatttgcaaggccatatttatccattttgtaatataagttccgaatgctgacaccgagagcttttgctgtttttgtccggttaaaatgatgcttttcgagcgtttgctggatcaaatgtgcttcaaatttttctactgcgacagacagcttttcgccttcaatatccggaaaatcaaaacctgttccctgatctgtgtcattttctttttgctcaagttcgaatacaggcaagtgatctttttcaatccattccatatgcggattcagaaaaatcatggctcgtccaaggacattttcaagctcccggacattcccaggccaatggtaggcagataaggcgcgcaaggcttgttgtgagagcccttttacattcctgccgtaatcccggttgatcttttggataagtctgacgctcaatgcttcaatgtcctccaaccgctgccgcaaaggcgggatggagatcggatagcgattgatccggtaatacaggtcttcccggaatgttccgtccgccatcgccttttcaatatttacatttgtcgccgcaatcactctgacgttgacagggatcgctttcgtgccgcccactctgacgatttccttttcttgaaggacgcgtagcaatttggcctgcatattttgtgtcagctcaccgatttcatctaagaaaatactgccgttatttgcttcctcaaataaaccctttttaccgccgcgtttcgctcctgaaaatgcaccatcctcatagccgaacaattctgattcgagcaggttttcagaaagggctgcacaattcacgcgaataaatttattgtatttccggtcactttcgttatggatggcatgggcgaacagttcttttcctgttcctgattccccgcgcagcaagatggttgccggtgttttcgcaccgagcttcgcctgctcaagcgcaaccagcatttgctcgcttttgccaataatgtcgtcaaacgtgtatttcgcttcaagcgtgcgaataatttgtctggcgcgattaagctccgctgtcagcattttaatttcggaaacatcgtgaatcacgccgacgctgcctttcaaaatcccgtccacaatcaccggtgctacattaacgatgacctctttttcattcgggccgaccttcattctgacaccgcggacaggacgtcttgtttcaagcacctttaaatgcatgctttcgccttcggaaatatcagtgtttgcaggcttgccgatgacttctttttcagaaagccccgtcattttcgtatacgctttattgattagcaggccgatgccgttttcatcaacgacagaaatcgcctcatcggaggattgaataatcgcctccagcatcgtacggacctgctttaagttggtcacttcctctgccagctcgaccgcatcagtgatatctttaaacacacaaagagcaccgagcagacgtccgccttcatcaataatcggcagtcttgtggtcacaatttgcaaatgatcgcctaacagctgcttctggttgtattcaggcactcttgtttttaaaatccgcggcatcttcgtgctcggaatcacttcttttattgggcgcccaatgacttcctcacgtttttttccgaccattttttcggccatatggttaaagagaatgatttcttcattgatatcaataaaaatcattccatcatgggtggaattaaaaattctgtcatatttataggtttgctcttttagcatttgaatcaggtgctgcttttcttccatcagctgaaaaacgatgtatgccatttttcccggcatgacaatggtatcttcatgctttctttgaaggagctcgtcaaacacggcttgatcgccggtggtatgaatgacgatatccggtttttgttgtatgtaaggtttccaatcagatgatacggcaatcccatacttttctgcttctttcaatcccggcgcctcggggtctttgtcaactacggcaatgatatctatgatggctgttttaatcagaatatgtaataacgccgttccccttttgccggcacctactatcagtaccttttgcatcccgatacccctttgtatgaaaaaatttgcacacctatttattccgttgcaataatttgcacaaccctatgttaccacgttttcttctcttgacaaaatattttttccgctggacaataaaggaaatgaaaagataaaggggttttctgaagatgagccgacttcttgcgcttttaatattagtcatccccggggctatttctgctttaggcattaaactgatgagagatacacttttcggccatacaatcaagccattttcagctctttggctccaagggttgtcaggattcatcttttttgcgatcggcctctatgtgctggccgggttcattttatacagagacagaaaacgcaatcaagtcagctcgcgattcagaaaacgatagctgaaaaaaagccggagaatgctccggctttttttgttgcattattcgtcaggcaaaacggtcttggcaatcgttttgtctaacgcttcatagtcataataagaaatcgtatcgtacagttcttttcgtgtctgcatatcatgaagtccttctttttgtgagccgtgctccttcatcaaaccaaacatccgctcacaagcttttgccgccgctcgaagcgaggtgacaggatatatcaccatgtgaaaccccatatcttcgaattcatcggcacgataatatggcgttttcccaaattcagtcatattcgcaaggagcggaacggggatacgctcagcaaactggcggaattcattctccgcctgtagcgcttccgggaaaattgcgtccgctcccgcctcaatgtaagcctctgaacgttttattgcggcatcaagcccttcctgcgccctggcatcagtacgggcaacaacaataagggagggtgccgcttgtttaatggcttttattttttgcgccatttcctttatcggaactagctgtttgccatttaaatgtccgcatttttttgggagctgctggtcttctatttgaacggctgctacccttgcttcaagcatctcccgggctgttcgggcggcatttaagacaccgccaaatcccgtatcgatatccacaagcagaggcagatcagctgcacgtacaagatctttggcccgttcagctatctctgccgatgtgatgatccctaaatcaggcagccccctgctggctgtataggcagcaccggacaaataaatagcagaaaaaccggcttctttcgcaagcaaagcggccatcccgtcatgggcgccgggaatttgaagaatgtccggtgctgacatcagcttgcggaaacgcccggcaagctcctcttgtgacgattgcttattgacgatccacgacatgaaacaaatcccccttttacatgcagaacatgtctacgaattcatttacgcgcatcgtttgtaatgtctcatagctggtacagcgctcataaatgtgtttgtgctgtttatcaggaaaatgggttttgagattgtcagaaaacttttccagcagtttcggcactgcttcctctcttcgaaaacgatggccgaggggaaactcacattccaccatttccgtgctcgttccgtctttaaaatgaacctgaacggcatttgagatggaacgtttatcaggttttaaataatcctcggtatatgttttattttcagtcacttccattttatcacgaagtttatctattctcggatcactcgctgtttcagcttcataatgctgtgcggtgatatcaccaaaaagcaaaccgattgctgtaatgtattggagacagtgatcacggtctgccggattgtggagcgggccttttttatcaatgatacggatagcggattcatgcgttctgatgacaactcggtcaatctcgtcaatccggttctttacctgcgggtgaagaatgacggcgcactccgccgctgtctgggcgtgaaattccgcaggataagacactttaaataacacattttccatgacataagcgtcaagcggacgggcaagcttgatctctttcttattgaataaaacgtcttggaacccccaacccggtgcactcagggctgtcggataacccatttccccttttaacgacatcagcgccaaatgaacacctctgctcgttgcatctcctgccgcccatgatttacgcgagcctgtattcggtgaatggcggtatgtcctcaatgctgcattgtcaatccatgcattcgaaagcgcatttttgatttcttctcttccgccgcccaaaagctttgccgcaacagcggttgtcgcaactttgacaaacagcacatggtcaaggccaactcgatttaagctgttttctaacgccagcacaccttggatctcgtgtgctttgatcatcatctcaagtacgtcgcgtactgttaacggctcttttccttcagacagcctcactcttgatacataatcagcagcggcaaggattcctcccaagttatcggatggatgcccccactccgccgccagccacgtatcgttgtaatcgagccagcgaatcatgcagccgatattaaacgctgccctcacaggatcgagaacatatgacgttcccggcactttgcttccattcggcacagtcgttcctggaacaatcgggccaagcagctttgtgcattccggataccgtagcgccaagatcccgcagcccagggtatccagcaatacatgccccgctgttgtatacgcttcggcactagtaatctctttctcaagcacatagtctgtgatttcttcgataacacgatccgttttcggcattctaccagttcctttcatggttttgtttgatatcgcgggcccatgtaactgacgcggggacggaagagccgattattggcatgctgttcgatcacatgggcgcataaaccggacgttctcgcgctgaaaaagatcggcgtatataaaggaatcggtatgccgagcatccaatacactggggcagcatagtaatccaaattcgggtaaagccctttttccttctccatcagccgctcacccgcttcgcacatctcatataaacgatggtcaccggctttatcgcataattgctgcagcgcctctttcatcatgagtgctctcgggtccatttttttcatatacacccggtggccgaagcccatgattttttcttttcttttcagttttgtttgcaaaagctgctcaaaatcagatgtcgtttttgcctccaaaagcaaatacatcacagcttcgtttgctcctccgtgaagattccctttcagggaagcgacagccccagtcaaagccccataaagatctgaatgtgtagatgcaatgaccctggccgcaaaggttgaattcggcatctcatgctcactgtacaggacgagcgaccggtcaaaaatctgttcttccaatgaagacggcaatttccctgtcatcatgtagagaaaattcgcactgtaggatagggtttgaagcggaagaatcggttctttcttattaatgatcctgtagctggcagcagtgagggcaggcattttcccaagaagctgataggcgcgttctttgtttgcggaaggagaccgatcatcaatttgccgatcatagccagcaagtgccgacaggccggtacgcagactatccattggatgagtgtcctcagggagcagctcaagcagacggagatgatcagcaggcaggcttgaggcactgattattttacgttccagcgtctccatttcactttcttctggcagcctgccctccagcaataaatggacaagctccagatagctttttgtttcagaaagctctattaaatcatagcctcttatcaaaatctggctggactgcgtgtcaagataagaaatatgagtttctgccgcaatcacaccgtccaaccctggagaatattgctgtttctcctccatatcctcaacctccgtttttgcgttttttgtctatcaggttccgccaagcaaatacttggaaataatcagtctttgaatctcgttcgtcccttcataaatttgcgtcacctttgcatcgcgaagcaggcgctcaactggataatccttcatatagccatatcccccataaatttgaacggcgtctaacgccgcctttacggctgcatcggaagcaaattgtttagccatagacgcttcttttccacagtttaggccgcggttatgaaggtctgcagcgtggtagacaagatgtcttgccgcctcagctctagtcgccatatcagccagcttaaatgaaatggcttgattggctgcgatcggccttccaaattgcactcgctgcttcgcataatcaacggcatgctcaagagccgcctctgcaattccgagggcctgtgccgcaatgccgatccggccgacatttaaattcgccatggcaatgtgaaagccatccccctctttgccaagcaaattggcttcaggcacttctgcattatcaaaaatcagttccgtagtattggagccataaagccccagctttctttctttttttccaacggtaaaaccgggtgtgtttttttcaacaataaaagccgaaatcccgtgcctgccttgatctggagctgttaaagcaaatgtgatatagatatcagctgctccgccattcgttatgaatattttcgatccgtttaatagatatttgccgttctttttgattgctgttgtgcggaggctcccggcatccgaccccgagtgaggctccgttagtgcaaatgcgcccaaatggtctcctgacgcgagctttggtatatatttcatcttctgttcttcgttgccgaagtacagaatcggattcgtgccgactgaggtatgaacggagagaatcacgccgacagccgcgctgattctagaaatctcatgaatcgccaaaatataagaaacaacgtctgccccgacaccgccgtactgttccggcaccggtattcccatcaggccgtgttcgcccatttttttgatcagctgaaagggaaattcgtccgttttctccatgatttccgcagcgggagcaatttcttttcgtgcaaaatcacgcaccatttttcgcatcatgacttgctcttgggttacatgcaactcggccacccccggatggaatagacttcaggaagtcctctcctcatagtcataaaaaccgcgtccgctctttttgccaagccagcctgctttgacatacttgcggagcagcgggcatggacggtatttggaatcgccaaggcctgagtgaaggacttccataattgataaacacgtatccagtccgataaaatccgctaatgcaagcggacccatcggatgattcatgcccagcttcatcacttcatctattgcctccggcttcgccactccctcatacacgcaatagatggcttcattaatcattggaagaagcacacggttggaaacaaacccaggaaaatcattgacttctaccgctgttttccccatcttttccgctaatgccataacatctaaggccgtttcttctgatgtagccaagcctcgaatcacttctaccagcttcattacagggacgggattcataaaatgcatgccaataacccgttgaggccggtttgttacagcagcgatttctgtaataggcaaggaagatgtattgctggccaaaatcgtatgaggcgggcaaatgcgatcaagtgttttaaacatctcagtttttgccgccatgttttctgcgatagcctcaatcacaatgtccgcatgctctgcctcctcaagcgtttgagaaatcgaaatgcggttgattacgctcttcacttccgtctcggtcctttttcctttctcagcatcacgggccagctgtttcttcagccgtttcaatcctgcctccgcggcctctggattcacatcatacatccgcacataaaagcccgcgccggcagctgtttgagcaattccgcttcccatctgacctgcgccagctaccatgatttgtttgatttccattcaaatcccctttttcatcatgttttaatgaacctgcactaagacggcgtctccctgtgctgccccgctgcaaatagcggcaacgcccagaccccctccccggcgctttaattcataaacaagcgtcatgagaattctcgccccgctcgcgccgatcgggtggccgagcgcgatcgcaccgccattcacatttactttttcaagatcgaaacctacgattttttcacatgtcaaaacaactgaagcaaaagcttcatttacttcaaacaagtcaatatcttggacagttaaaccattctttttcaggagcttgttaatagcaaaccccggcgctgccgccagctcgtgcgctggcattcccgtagttgaaaaaccaagaattgtagccagaggccgtttgccaagctcagcagctttttcctcagacatcagcacgaacgcgccggctccgtcattgactccaggagcattgccggctgtgatagaaccgtcacttgcataaatcggagcaagttttgcgagctgatccagacttgtgtcacggcgaatcgcttcatctttatcaacaacgtttggttttccttttcgaccgatccagttgacgggaacaatttcatcctgaaacttcccttcatcggcggccttagctgcccttgcatgacttctcaacgcccattcgtcctgctctcttcgtgagattgcatattccttggcagctgtatttccgtgaacagccatgtgcacctcgtcaaatgcgcacgttaatccgtcatacaccattaagtccctaagctcgccgtcccccatccgtgctccccagcgcccggcgggaacggcatacggaatattgctcatgctttccatcccccccgcaacaagtatgtccgcatcctgcgcccgaatcatttgatcacataaagtgacagcgcgaaggccggaagcacagactttattcagtgtttctgacggcacactccaaggcattcccgccagacgggcagcttgacgggaaggtatctgccctgagccggcctggacaaccatgcccatgacgtttccttctacatcatctccagagactccagcccgttgcagcgcctccttcatcacaatgcccccaagctcagcagctttcacctctttcaatactccgccgaatttgccaaatggcgttcttgcagcacttacaatgactgttttcctcatggtttcacctcattcagaagatagacagcgcttacaatttctagttgtcttctatgaatgtatgctttgaaacgggcatgaatgaatgaaaaaagaaggctgcgtcaaacagcctccttctaacaactattcatttttcagcaatgccgaagccttttctggaaagtcggtaaacatgccgtctgctcccgcttcaatgagacgcttcatatcttccggacgattgactgtatacggccttaccttaatcaaaccgttcctcattttcttcagtacttcatctgtgacccctgggctgtttaacttcgggtgatagccggaagccggaatagacgcgatatatcgatctgcctgataaagcacatctgaagttaatactgcccgttcgatatgcggtgcaagccgggcgcacagcgccaagctgtcatgattaaacgtggataggatgactctgtcctctacattaaatcgcttcactgcctccagcactttttcttccattccctcatagcggatcacgctgttttttaattcaatgttgatgagaaaatccttttttaccgcccacgagagcacatcttctagcagcggcacttttatatcgctgtacgcttgatcgtgaccagcggccgcatttgcagtctttacctcatcataggctgtatccttcacgaatcctttaagtgatgtcgtgcgattaagtctttcatcatgaattacaacaatgcgtccgtctttcgtcagctgtacatcaagctctatcccatccgctccggcttcaattcctttttcaaatgcaagcattgtattttcgggaaattgacctgatgccccccgatgggcaaaaatctttgtcatcgtttcacctcaaaccctaaagttttctccattatacttattttgtcggctccactctaggattaaggctgtatcaatctactgatcataataagaatcaatgccgttgacaatcgcatctgcggccttttgctggtattcttcacttcccagcttgtccgcgtcagagctgttcgtgataaacccaagctccgccaacacacttggcatttgtgaatatgtaatgacgtaaaagtctgattctttcacgcccctgtctctcgtttgtaaggaagaaacgagctctgactgaatatcggatgcgagacgccggctgttctccccttcataatcagattgaaaatacgtttctgttcctgaagctgaagcaacccctgaattcacatgaatgctgacaaaaaggtcagcctgattggcacttgccttagccactctttcctccaaggtcagaaaatgatcgtcagaccgggatgcaacaggattggctacctcctcttttagtttgtctgtcacatgctctgagacagccaaattaatatccttttcaaagagcccgtttccgaccgctccactatcttcaccgccgtgtccggcatcaatatacactgttttcccttctatcggctctgctgcctgtgcacaaggcgcgagcgtcaaagccaatccgcacagcgccaagctcctccataacattctcaacttactccctccggtcacgagttctttcgcagctgaatatcttccagctgtaaagttccattatccttctttgtatatttcaccaggacatgtgtctgatctggcagtgattcacattcatcacgtttatccttcggaacttgtatcatggtttcttctccattaagagaaaccgcaatcgtatgaggatcagccgagccaatgtattttccctcttcggtaaaccttggcactgagtcatccgcacttgcaacactgcaccccgaaagaaagagcgcagtaaacagcaaaagaaccgtttgtttcacatgaccacctcttcctgatgtttggcttttatctttgaccagaatggcgaatttgtaaagacaacgcgaatgcaggcgagcaagttccatgattttcaaaagggctatacgacccgatcatttcctgttgttagaaagataacgagcagatttgtctatgaggatggctctaattgaggcgtcaattagaaaaaattagcggaaagaagcaactttttattcattttaaaaaatttgagaatagggtgagcaaatcgtttgacgggtgggtcagccaagcgtaaccttttaaaggatatttactttattgaaagaagttaaaaccatgaaaaaattcgttctgctgctggcggcagctgtcatcacatgctccatcggccaccaaatcagcggcggctacaaaggccccgaaaaagagcggcgaaaacatcactctgcactcaagatattcagtcggtaaagcagatcaattgcattaatttttacatataggctagaatatgtgcgaatccaaacgaaagaagatgatcaaatgaatcctaagtataagccactttttgaaccatttacgtttaaaagcggcgttacaatcaacaaccggatcgcagtagcaccgatgactcattacgcttctaatgaagacggtacaatatctgaagcggagctcgactacatcatcccccgttcaaaagagatgggaatggtgattacagcctgcgcaaatgttacaccggacggaaaagcattccccgggcagccggccatccatgacgattccaacattccaggtttaaaaaagttagcacaagccattcaggcacaaggcgctaaagctgttgtacaaattcatcacggcggtattgagtgcccgtctgagctcgttcctcaacaggatgttgtggggccaagtgacgtgtttgataacggcaaacaaattgctcgcgcattaacagaagaagaagtggaaaacattgtgaaggcgtttggagaagcgacaagacgcgccattgaagtcggctttgacggtgtcgaaattcacggtgcaaacggctacttaattcagcagttttattctccgaaaaccaaccagcgcacggatcgctggggaggaagcgatgaaaaacgattagccttcccgctcgctattgtcgatgaagtgaaaaaagccgcttcagaacatgcgaagggtgcgttcttagtcggctaccgcctgtctccggaagaacctgagacaccgggattgacaatgactgaaacttatacgcttgttgatgctttaggggataaagaattggattatcttcatatctcactgatggacgtgaactcaaaagcgcgccgcggtgcagatccgactcgcacacgcatggacttattgaatgaacgtgtcggaaacaaagtgccgctgatcgccgtcggttccatccattccgctgatgacgcgcttgccgtcatcgaaaacggtattccgctggtcgctatgggacgcgaaattctagttgaccctaactggacggtaaaagtaaaagaaggccgtgaaaagcaaatcgaaacagtgatcaaaggcacagataaagaaaaatatcatttgcctgaaccgctatggcaagcaattgtgaacacacaaggctgggtgccttataaagattaatgtgcaaagactgccgaaacgattcggcagtcttttttccctttatataaatagtttgtgtacacatctaaacagcaaaagaaagagctccccaccaacttcgaaaagaaaatccaggaaaaacccctcacgctttcttgcttttttctttttcattcgtacgtctcctttttacatgaatacgccttacttacgattttgcaggagaaaggtttcattttataacggacacatctagggtcgatcatgcttcgtgatcctataagatgtatgaatggaccaagagtgcaggtaataccgccatttgctttccttacttttcaaacctatcctttactatatgcggatacttaatattcttctcccatactaacaaatgtccccaaaacaaaacgcctcctatttatcagcgcaaactaataaataaaagacgtttgatttaatgaccacttaataagctcatgtttaagaagccttatgttctaatctcagcttatccgcaaccattgcaatgaattccgaatttgtcggtttagcttttgtcatgctgacagtataaccgaacaacgaggaaatggaatcaatgtttcctctgctccatgccacttcaattgcatggcggatcgctctttctacacggcttgcggttgtgttgaattttttggcgatgtccggatagaggacttttgtaatgctgccgagcaattcgatgtcattgtataccattgagattgcttcgcgcagatagagatagcctttaatatgggctgggacgccgatttcatggataatgcttgtgatgctcgcgtcgagatttttcttctttggttcaggctggctgctgcgtataatactgctttgcgatgatggcgcacgatgcgtcacactgctggcatttccgctgacctggcggatatggccgacaaggttttccatatcaaacggtttgagaataaagtaggacgcgcctaaatcgacggcctttttcgtgacatcttcctgtccaaaggctgtcagcataatgacattcggctgttttttcagatctgattccctcagcctctctaaaaccgcaagtccgtctaaatgcggcataataatatctaatacgagcacatcgggatctttttctttaaacagcgacaggcattcctgtccgttataagcaacgccgatcacttccatgtcttcctgtccttctatatattcacttaacaggcttaccagctctcgattatcatcagcaacacaaactttaattttctccacgtttcttcctccccaaatgtagttaacaggattcacccttgctacatgtttacattcgacaaaaccgctatataccctctaaaaaaatcataatcaccaatattagtggcatatctttgttattctatgtttttctctgtttttcgactaaaaatgaaatttgacaaacaaggaaacgtgaatttgtcgaaaaatcttcttttgtatattttaccgtatgtattctgagaagtgaagagggatcaaaataaaaaaactgccggaaactccggcagtcagcttgctttttcttttccataaatatcgattcctgcttctgacagcatccattcaatatgaacaccgtagccgcttgtcgggtcatttacaaatacatgggtgacagcaccgatcacttttccattttgaatgatcgggcttccgctcatcccctgtacgatgcctcctgtttctttcaacagtcttggatcggtaattttcaacaccattccttttgtcgcagggaatttttgcggcgttgtgctgacgatttcaatatcgaatttttctactttgtcatcatcaataacggttaaaatttcagccggcccttttttgacttcggtagaaaacgcaaccggcaatgcttgatctgatatgttgttttgaatcggctgatgcagtgtgccgaaaatcccaaacgggctgtttctgttaatatccccgatcgttttgcgttctgaggaaaatcgcgccagtttttctcccggattaccgcctgtccctttttcaattgatgttacagtggatttaacgatttctccattctccactacaattggtttctttgtgtccatatcggaaatcacgtggccaagtgctccgtatttttttgttttcggttcataaaaggtcatagtgccgatgccggcagcagaatctctgatatataacccgattctgtatttgccttctccttcatccttttctgggatcagcttcgttttgattttctgtttatcacgtttgatcagtaagtctaaagattcaccagttttcccagccttttgaataaatggggctacatcattcattttttcaattttctgtccattcatctcaataatgatgtcgcccgcctcaattcctgccgtttctcccggagattttttgccttcacttgtattgatttgatgaaatccgacgacaagaacaccgacggaatgaagttttacaccgattgattgtccgccaggtataacttttaaatcaggaagaacatgcacttttgtttttttaattggaaatccggcaagatcatataccaattctgactcacctgattttttgcccgtcaccttgatttcatgcggatctttctttactgtaaacgcttctgaggattctgatgtctgagcgtttaccgataaactcgtttcaatcgcttgtgtttgggtttcaaatactctcatttgcgttggaatcagtaaatattcttttagcggtttgcataaacctacacttaataacgaaacaaggagaattaaacctactgcttttctgatgttatcgggcattcactacttcactctcctcgctcctatcccacaccttctttatgacttgctgctacatcatttaattttgccttctgacggcttatttataactgtcatatgaagaaaaacattggatatactgatgaacgaatggatgtgcacgaaaaaaataagctgcgcttctcgcgcagcttacccagttgttttgacttgatccgcttgttttaaaagttctttcgcatggcgtttcgttaaatcggttacctcgacacctgcaatcatgcgcccgatttccgctaccttttcctgcttagacagcggcttgacacgtgtcgtcgttctaccgtcttttaactccttcgcaatataaagatgcgtatcggccatggcagccacctgaggcaggtgtgtaatgcacagcacttgtgaacctattgacaccttatggatcttctcagcgattgcctgtgcgaccctgccgcttacaccggtatcaacctcatcaaaaatgatcgatgtcacatcctgttgtgaggagaaaatgctttttatggcaagcatcacccgtgacagctctccacctgaagcgactttcgaaagggattttagcggctcgcctgtattggttgaaattaaaaacttcaccaggtcaatcccttgttcagtcagctgaacgggctggccgtttacaagcggcgcctcttcattgcgtgacgctgttctgaccttaaattccgtatcaaaagttgatttttccatgtacaggctttttaattcccgatgaatctcatcagccagctttttcgcccatgtttttcggatttgtgacacatttgccgcttccactgcgacatctttgccgacggagtcaagctcctttttcaagctttgaaggtggctgtccctgttttcaatttggtcaatctcttcttcaattttagaagcatattccaaaatgtcttcaacagtggcaccgtattttcgtttcagctgtttgatttcattaagtcgcgtctcaatatagttcaggcgttccggatcaaattcaagctcatccagcatatttctcatctgaaatgtggcatcctcaagcaaatagtaggagttcgaaacactttcagacatttttttcagcggttcgtttatatcagatatatcttcaagctgcgctgatgccattccaacccagtccaatccgccctgctcactgcgaagcgcgttatatgcattttgcagcgactcatatatcttctcaaagtttgaaatttgctggcgctcttcttggagctgttcatcttcgttaagctcaagctttgccgattcgatttcttcgagctgaaattgaataagatcaagacgatgggccatttcctgttcgctttcagaaagctgcttaagctttttgagcagcttcacataccgctggtacccttcctgatacgttttgagcgcgctttccacttcggccccggcaaacttgtccaaaagctggagatgattttcgtcttccattaacagctggttatcgtgctgcccgtgaatatctaataaaagcctgccgatctctcttagtgaagcaatcgtgacaagcttgccattgacacggcaaacgcttttcccgctcgtgctgatatcccttctcatgacgatcatttcgtctgaaacgtcgattccctgctcagcgcatacgcctaaaacaggatggccgctctccaacagaaacagcccttcaagttcggcttttgcttccccatatctaacaaattcagatgatccgcggcctccgactaaaagagaaatggcatctatgatgatggatttgccggctccggtttctcctgttaaaaccgtaagcccgcgttcaaaagaaaccgtcagttcctcaataatggcaaagtttttaatcgatagttcagctaacaaacagcattacacctcttatctttgttagattttctgttacagcagttcaaggagcctgttttttacgccttctgtatcttcaggagtccggcaaataattaaaatcgtatcatctccgcaaatggtccccatcatttcatcccagtccaaattgtccatcagcgccccgattgcctgggcattgcccggcatcgttttcagcacaatcatatggcttgctgagtctattttcacaaatgcgtccatcaatgcccgctttagctttgacagcggattgaaacgctggtccgccggaagactgtatttgtaagaaccattatttgtaggcacttttacaaggtgaagttctttaatatcccgtgataccgtggcctgcgttactttgtatccatcctgctttagcatgtcgaccaattcatcctgtgtttcgatttcattgcttgtaatgatctctctgattttaatatgcctctggcctttgttcatgtaagcacctctatttccaagcttatctgttcttttatgttatatgattctctgcacattgtacatgaatgcagaaaaaaggaataatagcgccctattattccggtacatctgcttttttttcttttaacgtcttatgtgcttcttctacaacgcgcatgatctcttcttccggcagttcctggccttcctgtccctctcccggccaatgcaaatgaaggagaaactcaatatttccgtctcctcccgtgattggagaaaatgacaagcctttacagatatagccttcagcggcagaaaaactgatcattcgcttgagcacatcagcatgcactttaggatctctaacaatcccttttttgccgacggattcccgtcccgcttcaaactgaggcttaactaaagccatgcagtcgctgcccggtacgagcaaagtccttaggacaggcaggatgagccgcagtgaaataaaggacacatcaattgtggcaaactccggcatgccctttgtaaagtctgccggtgttgcataacgaaagttcgtccgttccatcacgacgacccgttcatcctgtctaagcttccatgcaagctgattatagcctacatccacagcgtatgactgtttagctccattttgcaaagcgcagtccgtaaaaccgccggtggaggagccaatatcaatcataattttatctttgacagagacgggaaattccttcaacgctttttcgagctttaagccgcccctgctcacatacctcagcgggtttcctttgacagttaacggaaggtcgcggtcaattttttctccaggcttgtccaagcggttttcgtttgaatagacgatccccgccataatggctcttttggctttttcacgcgtttccgccagccctctttccactaataatacatctaatcgttctttctttgacgtcatgatccaattcctttgtgtgtctttggcggcatcagtaatctaatacgatttgccacctgctgttttgtcagtccaatttcctcaagaagcgctgttacacttccgtgttcaataaaccgatcaggtatacccattctgtcaatcggagtatgatattcaccttgatcatgagcgaattctaaaatcgagcttccgaaaccgccttctaagaccgcttcttcaattgttaaaattggcaagccttcttttaggatactcttcatcatcttttcatcaatcggcttaataaaacgcgcattcacaacgcgcacggaaaggccttctttctgcagctcttcggctgcttcaatcgccatttcgattgttgtgccgaatgttaagatgacagcatcgttccccggacgcagcacctcccacgtaccgatcggaatcgttttcaactgttcatccatttttacgccgagtccgtttccgcgcggaaaacgcatcgctatcgggccttcgtcatagctaagtgctgtatgaaccatatgctggccttcattttcgtctttcggcatcattaagaccatgtttggaatgtggcgcataaacgcaatatcaaacacgccttgatgtgtctctccatcagcgccaacgagtcctgcacggtcaattccaataaacacattggcgttttggcggcagatgtcatggacaacttggtcatatgccctttgcaggaaggttgagtaaatcgccaaaaacggcttcataccctgcattgccatagctgccgccatcgttgcggcatgctgttctgcgattcctacgtcgaacatccggtcagggaattcctttgcgaaaccttcaagctttgaaccgacaggcatagccggcgtaatggctacaatgcgtccgtcctcgcgcgccattcgctgcacagttccgctgacaagaccgctccacgaaggagctgcggctttcggctttacaaagtcaccggtattaattttatatggtccggtaccatgccatgtcccaatcgtatcggtctcagccggtttgtaccccttcccttttttcgtgatgacatgcagaagaacagggcctttcgtttttttggcgtattgaagattctcaatcagctcatgataagaatgtccgtccactggacccaaatacgtaaaaccgagctcctcgaaaaacattccggagacgagcatgtatttcaggctgtctttgactcgttccgccgtggcggcaagcttgcccccaactgccggaatctttttaaataagtattcaagctcatctttgacccactggtatttccccgcagtacggagccgtccgagcatagagtgaatggcaccgacatttggtgcaatactcatttcattatcattaaggatgacaatcatgtcttttttctcgtcgccgatgtggttaagggcttcgagcgccattccgccggtcagcgcgccgtcaccaattatcggaataatatattcatccgttcctttaatatcacgggcagctgccattcccatcgcgcctgacagagaagtcgagctgtgcccggtttcccaaacatcgtgctcgctttcactccgctttggaaatccgcaaagccctttgtactggcgaagcgtcgcgaattcttttcctcgtcctgtcagcagcttatggacatacgattgatggcctacatcccataaaaatttgtctttcgggctgttaaattccttatgcagagcaatagtaagctctacgacacctaagtttgggccgatgtggccgccggaagcggataaacttgtaattaaaaactgacggatttcatcacttaatttctctaattcatcaatggacatgttttttaaaaacgacgggtcctgtattgataaaagatccaaagcggatcaactcactttcagcatgaatttctgcaatgatacatgtcttttgcatgccgagctgacaataatctcagacataaaaaaagacaaacgcgcttttccttttcatttttcatataaactgcttacattttaccatacctcgtgcagccgcttcaaattaggatcgttttagtgatctcttgccgcaattaaatcacaaagctcatataaaaggtctttttgaagagagagtccgccgatcaatcgcttcgcctcttttatatgaacatccaatttatgtttggccccttccaatgaaagaagcgacgggtatgtcgatttgtcatttgtggtatccgagccgacacgtttgccgattttctcttcactgccttctaaatctaaaatatcgtctctgatttgaaatccgattccaatgtggctgctgaaggtacgcagtgtttcaatgtcttcctcaggcgcatcagccaaaatagcaccggcgattacacaaaagccaaggagcttggcagttttccgttcatgaatggattcgagctcttcaagcgtgacttgtcggttttccgcttccatatcagctacttgcccaccgaccatgccttcggtgcctgccgctgaaatcagttcattcacaagccgcaggcgcttttctgctgacacctcgtctgacacgtgggaggtaatcagcttaaagctttctgtgagcagcccgtcacccgctaatactgccgtcgcttcaccaaacactttatggtttgtcggcttcccgcggcgcaaatcgtcatcatccatgcatggaagatcatcatgaattaacgaatacgtgtgaatcatttcgacagcacagcccaccggaatgccgtctttttcgctttttccatatgcatttaaaacagccagtacaatcagaggccgcagccgctttccgccggcctgtagagaatacagcatagatttctttaatgagtccggcatatcaagcttttctgtatagacagaaagctgattttcaattgtttttttccggtccgccagaaagctcgttaatttatttgtcaccttcgtcttcctcctgaacactgaaaggtgccagttcgccgtcttcttttaaaatgaagtccatttgcttttcgactttttgcagcttttcatggcacatttttgacagagccatgccttcttggaaatagttaatggcttgctctagaggcacatctccctcttcaagctttgatacaatgctctcaagccctttcatcgcttcttcaaatgtcatgttttcattttttttcacgtctgtcatttttcttcccctctcttttctaatacttcacaggtcagcacgccatccttcagcttgacttcaagccggtcctgctcttctatttgactgacacttttaatgagtttatcttctttataagccaagctgtatcctctttccatcacttgaagaggacttagtgcattcagcttgccaagaacggtttgaaattgggaatgcagctgcttcatttggatattcatattttttctcagctgatttgtttgttcctggtatcgtgttctcgcttgtttcagctgttcatgaggatgcagtgcctctaatctgtacgtttcacgctccagctgtctgcttttccgatctaaaagagcggtcagctgtgcttgaaactgctggtacgcgaggtcaaactgctgctctttttgcgcatacaaacgctttggaaaacgaaaggcataggacgattgcagcgtttgaatccgttcttttttctggccgaggtgctgctgcatcgctcttgtcattctgacttccgctgtttttgtccgttcgattaaatcagtggtatgaggcacagcaatctcagctgctcctgtcggcgtcgcagctctgatatcggcgacaaaatcactaatcgtaaaatccgtctcatgtccgactgccgatataatcggaatattggaagcaaagatggcgcgtgctacaatttcttcattgaatgcccacagttcttctatcgaaccgccgcctctcccgacaattaatacgtcgcaaatctctttttcatttgcctcttcaatgcgcgtaacgatggatctgctcgcattttcaccttgtacgagcgctggaagaacaatgacttttacaaggggatatcttctttttagagttgtaataacgtctctgacagcggcacccgttggagatgtcacaaccccgattgtggctggaaatgcggggatttgttttttgtagcggtcgtcaaataaaccttctccggcaagcttcttttttaattcttcgtacgctaaataaagcgctccaatcccgtcaggctgcatttctttggcatataattgatagtttccgctcggttcatatacggaaattccgcctctgaccagcactttcattccgttttcaggtttaaaaggcagacgctcgctttgtctcgcgaacatcaccgactgcattcttgcgttttcgtcttttaaagtgaaataaatatgccctcgtgtgtgtatctttacattcgacaattcgcctttaatccaaatattttcaaggtgaggatctacatcgaattttcgttttatatactttgtcagcgctgagacggtcacatacgctgcttcacccatgtctaaaaactcctctcctaagcattcctgcaccataactaaagaaaacccgccctggctttaggagcctgaagaagcgggtatcgtgctcatattcaaggcgggcaaacatttcgcctgtgaatatctccaattatctatgataacgtacgtttcgcagatttaacagtattatgcgcaagcatcgtgatggtcatcggacctactccgcccggaaccggcgtgatgaaggacgctttttcctttgccccttcaaattcaacgtctccgcaaagctttccgttttccagacggttaacgccgacgtcaatgacaacagcgccctctttgatctggtctgcactgatgaagttggctctgccgactgccaccaccaggatgtccgcttttttcgtatgttcagtaatattttctgttcttgaatgacagtaagtaaccgtcgcgttttcatttaataaaagctggccgacaggtttgccgacaatgttgcttcggccgactacaacaacctctttaccggaaaggtcaatattggttttcttcaaaagctcaacaattccatgaggcgtgcaaggaagaaacgtatcttcgccaagcagcattttccctacgtttaacggatgaaaaccgtctacatctttatcaggggagatacgttcgatcaccgctttttcagaaatatggtctgggagcggaagctgaacgagaatgccatgaaactcagggtcttggttatattgatcaataatggaaagcagttcagcttctgtgaggctgctgtcaaattgatcgagcttgaaattcattcccattgtttctgccgcttttttctttcctcgcacgtaagagtgagaagcaggatcatctccaatcaaaataaccgccagtccgggagtgacgccttgctttttaagctcttctacctcttttgccaattgttcgcgtttttctctagccgtttcttttccgtcgatgattgttgcagtcattttctttcctcctatgattgttcaatatcagatttaatgttagaaagaaccccgtttacaaactttgtcgctttgtcatcaccaaaccgttttgccagctcaatcgcttcgttcatggagacattcaccggaatgtcttcggcatatgccatttcatatgctgccaggcgcaaaatcgcacggtcaacattggcaatccgatcgagcttccaattcaccagatgcttggagatcatttcatccagctggtcttggtgttccaataccccgtgtacaagctgttcaaagaaaggatctgttttttcttcatccagtgcgtgttctatggcttcattcactgcaatatcgctgacatcaatttgaaatagtgcctgcaaagctttttctcttgctgttcttcttttcattttctttctcctttgatcctctttatccgcttgtcgttaagccacaaagagatcataacatatttttttcgtatccgcatattgaaatcaaggtttttttaccctattaccgaatattttcacacaccttaatatgattattcggatttcacgttcatgaagaaactcggctatgtaagccggctttcttcatgctttgaaataaagggtaacgtgtaaaaaaaccaaagggccgccctccccttggtttcgtgttaagccatttacatttcttcgtcgatttggacttcttgggcttttgtgtcaaattgaatgccgacgatgtgaatattgatctcgttaatcgaaagagacgtcatatttaataaggtttgacgaatgttttcctgaacggatgctgcaactttcggaatcgaaacgccaaatgtaacgacacagtatacatcgatcgtaattccgtcatccgccaggtcgactttgacacctttgccatgattcactttgccaaagcgctcaacgacgcctgtcgcaaagtttccgcgcatttcggcaactccatcaacttctgatgctgcaatgccggcaatgacctcaatgacctccggtgcaatctcaaccttacccaaatgcgtatcttcgtgatccattttaagcaagctgttgtctttcattcaattcacctccgtaaaaattatgagcccattacatcatatgtttctaaaaatttcgtattaaactctccgctcacaaatgtttcgtgttcaagcagttttaaatggaaagggattgttgtctcaatgccttcgatgacgaattcgctcaatgcgcgcttcatgcgggcaatcgcttcatccctcgtttttccgtatgtgattacctttgcaatcatgctgtcatagtacggtgggatggaatagccagggtacgcagctgaatcgacacggacaccaagaccgccaggaggcaggtacattttaatttcaccaggtgacggcatgaaatttttacttgggttttctgcgttgattcggcattcgatggcccagccttcaaattcaacatcttcttgcttgaggctcagttccattcctgatgccactttgatttgttccttgatcaggtcagttcccgtcaccatttctgtgactgggtgctccacctgaattctcgtgttcatttccatgaagtaatagcgctgttcattgtagtcatagataaattcaactgttccagcacctgtatagccaaccgcttttgcagcctttaccgctgcatctcccatttgctccctgatttctgaatcaagggcaggagatggtgattcttccaaaagcttttgcaggcgtctttggatcgagcagtcgcgttcgcccaaatggatcgtatttccgtagttatcagcaagcacttggatctcaacgtggcgaaaatcttctatgtatttttcgatgtatacacctggattcccaaatgcagttgccgcttcctgctgtgtaatcttaatgccattaatcagttcctcttcagtgcgggcaaccctaattccttttccgcctccgcctgcggtggcttttataattacaggatacccaatttcattagcaagcgaaaccgcttcttccacattttctataattccctgtgaacccggtacgattggcacgccggcctgtttcatcgtttcccgcgcaacgtcttttgttcccatttttgaaatggcgtcagcgctcgggccgacaaacgtgacattcacttcttcacataattcagcgaaatcagcattttcagctaaaaatccgtatcccggatgaatggcgtccgtgccagtcagctttgcaacactcacaatatttgtaacgtttaaatagctgtcttttgatgctttcggtccgatacaaaaagcttcatcggccatttgaacatgaagggcatctttatcagcttctgaataaacagcgacagtctcaattccgagctctctgcaggctctgatgattctgacagcaatttctcctctgttggcgatcaatagctttttaatcatgttcagtctccttactccgcttttacaagaaatagaggttgtccgtattcgaccagctggccgttttctactaatacttcaacgatttcgcctttcacttctgcttcgatttcgttgaaaagcttcatcgcttctacaatgcagacaactgtgttttcatttacttttgaaccggctgttacatacgggccagcttccggtgatgaagaagcataaaatgttcctaccattggtgaagtgattttatgcagattctcatcttgctttggtgcttcttgggcaggtgccgctgcttgctgcgcttgcggctgaactgcctgcggagcctgtgcttgtacaggtgctgccggtgcctgctgcatgacttgaaccgtgcctgcttcgtgttttttcagttttaaggatacaccttcattttcatatacgaattcgtcaattgtagactcgtcaattgctttaatcagctcgtggatttctttgatatttaacattcaatcgcactcctatgtatgaaatttctttttttataggttactgctaaaagtacatactatgttcatcttacaggagcggacttttgaattcaactctaatatgacagcaacgcaaaaagcccgcttgtttagcgggcttttttccctcattcttatttagagggttcaaatgtgacagcgacatctttcattgttttgatttcttttgccacaaggtctataatggctgtcgccttcgatttagagtgtttgtctgatttgactgtaatattgattttatctccttcagcattaacaagcgcatcctcgtaaccttgtgttttaatcagcgtttccagctgtttttctgttccttccacttcactgagagccgtcattttatcgtatgcttcgcttttctccttggctgttgcatcatcgcttgacacaatggcattcagctcttctctttctttgcttctggcatcttctaaatcaagacggtacgttgtaaacaaatcatcatcggctgtttccgtaacaacagttcctttttcactggcttcagcggatgtttccttgtctgctgatgaatctttcgttccctttgttccatcttcttttcctttttcagtttctgtaccgcttttttccttcgtgtcttgcttggcaggcgctttttcagttgcgacctctccgctgtcagacgcgcttttttcactttgcatctgcacggcgtttttgctttccggcgacatgatatagtagacgcttaacaccacgacaagactgagcattgttaatagccaaacggtttgttttttaagcatttatgaatcctcctttatttttttaggggcaaccgcaacccggtggcttggaacatccaggacccgtgtcaccgcttcgataatggtttgttttatttgaacgttgtccactccttgagcaacaacgagtacaccgcgtatatcaggttttttcgtttggacgacgacaggtgtttctttatcgccgtttttgatcatgacgatttcttcctccgatgtttggtctgtaacgcttcttgttccgccttctttgtcagtttcttcggtggttgtatttttgtttgatttgtttttttcgtatactttcagcgacgttgcatctacattcacgacaaccgagacatcgtccacaccaatgattgtttcaagaatttctttcagctgattttcgtattctttttcatagtcatcgatcgagtctttaggtttatcagattttgaggctttaaacacttcagctgttttctctttgctgcccgcggaatgttgcgatgatacggccgttatcgttttggcgttttctgttttctcaggtgaagaaaacagctggctgacaagcataaaggaaactccgagaacaaaaacgaatagaaagtaatgatatttggtcagcttcggcttttcgccgtccttcgtttgtcccggaagaaactgctttttcaatacattccataatccgtttttattcattgccgacactctccccgccttccatatgaaccgtaattttctcacttccgatttcccaaatgtccgcgagctgcgtttgtatctgtttggcttctttttgttcggctgcttctttcgttacgtatgcatgatctgtatcaatgtggaccggcgcgaccgtttggaccgttttttcagaagacggggccatatacacgctgattgttttaatatcctcttctgaatctaccttttctcctgccgtgagtttgatgcggcctactttatattcatcatgactgaatctctcctccgctttcttttttagttggacagccatttcttctagaatatatgcgcgctgggaagcttgtatttctattttttttgaattgatttgattttttatgtcggcagactctgactgcccgttttttgtgagatattcaaagatgatttcggggtctgtcttgaaaagtttaaaaatcggcgtaagcatgacgacaatcaagagcaggctgactaccatttttgcgtacttttgcatgctggagctcggcagcagcatatcaatcacaattgcaaataggataaacaacacgatggtggtaagccattccgttaaaaaactcattcgcctgcctccttcatttcatcatcatcgtgaggtttccggctgtgattatgacagtaaggcttaaaaaaaacatgagagacacaatagcgagagctgcaaaaatataaatgacgcttttgctgatgacgtcgaggcaggtgatgacgggcccgcctcctagcggctgaagaatcgcggctgccagcttataaataaaagcgagggaaagcactttgattgccggaaatgccgcgatacagatcaaaatagcaacaccgagaatccctaccgtatttttcagcagtaaagaggcgctgattactgtatctgttgcgtctgtaaacattcggccaagcacaggaataaaatttccggttataaatttagccgtcctgagcgtaatgccgtctgtcactgcagctgaggctccctgaacagagatgacgccgagaaagatggtaagaaaaacagccagcgctccgatagcgatatttctgagcaggttagccagctgcgttactttgtattgttcggtcatggtgctgacaatgctcagaatcgctgataagaaaatcagcggcatgacgatattctgaatcaagagaccgctcgtgttcatcaggaagaggataacaggatgaaagaaggcagcagatacagctccgcctgaggaagccaaaagcgccaagaggagcggaatgagcgccaggataaagctggtcatcgtctgaatcgcctcagttgcatagttaattgccacatgaaagctattaagcgcaaggataatcagcaccatgtacacaattgagtaagcgaccttactgacggtgctttgctgaaaagcattttgcagaagctgcagaatgacgcaaaaaatcgtgagcaaaatcaatgtgcccagcagctttccgttggcaagcacttcatgaaacaaataagaaaagagagctttcagccattcttgcggtgagaatgatttatcgccattgataaactccattaagctgcctttttggctttccggcagcagtccgccgtattctgtcataatgtcattccaaaattccccgatcttatctgtttcaagcgaggctgctgtcctttccgctaattgctcagctgtttcagcatggtcttccgtttgttctgcattaccagctgcttgtacaatttctgcacggcctgctatgatcagcacggccaaaagcaaaacccattgaaagcgcttcaatctaccgcctcctttcggttatgacatagaaggtataagtccgagaatcgtttcgataatgacggttaaaataggcacagccataacgagaattaaaatttttcccgccaattctattttcgaggcgatggccccttggccggcatcttttgtgagctgcgccccgaattcagcaatataggcgattccgataatctttaaaatggtttcaacatagaccatgttgacatttgcattaatcgcaattttttctatcattcgaataatgtcgtagatttggtctactaaataaagaaaaatggcacatccggcaaaaacgacgattaaaaacgcaaaagtcggcttttgttcttttacaattaaagaaaggaaggtggcgatcagccctaaacctacaatttgaacaatgtcaatctgcaagcccccctatccttggaataaaaacacagcttttatctttttaaataggtcatctacaatcgtggcgaccataaataaaatatagataaaacctaacagcgtcacccactgagcgtattctttcttgcccatctgatccaatatcgtgtgtaaaaaagcgaccacgattcctactccggcaatttgaaatatgacattcacgtctactcccattttatttttgctcccctcacgtttacatcaatagaagaatgagtaacaagcccgctaaaaagcccaaactttttatcattttttcatttttcgcttgcgcctgctcagcatccgcttcagaggcttccaaatgtgtcagcgccagcttgatgtgcttttgctgagagattcgatcatgaatcccgagcgtctcgccaaactgcttcagcacttcgtattcgctttttttcaaagacagggtgtcccataccttctttaagctttgctcccacgccgttttcgcggaatcacttcccttgtccagctgatcactgaatgcggaaaaaagagctgaaacaggctgtgcgagctgtttggcaatctgctgtgaagcagtatgaagcggtgtatggccgtacatgatttcagcctcgagggattgaagcgccgcacgcagctggcggatttgccgcggccgttctgtataaatcttcgccatctcaaaacctgtccatgttgtcgctaccacaataaatacagcgcccagcagcttcagcatgttttcacgcccgtcgtcctagacagcacatttccgtctttgtcataaatttggctcactgtgcccggcccttttgctcttgataattccaaatagcggtcaaaggctctttcttcccacaaacgcttcaatgaaggccgcttcatcaggtcggatatgctccagccatgcgccgatacaattactgaaacaccagcatgcagtgcctccagaagtgcatctgtatcttccatacgcccgatttcatcgacaatcatcacctcagggctcatggatcgaatcatcatcatcagcccttcagcttttggacaggcgtctaacacgtcaattctctgaccaaattgatgttgcggaatgccgcgaagacatccggcaatttctgaccgttcatcgacgattcctgtctttacgggcagcatgggttttttgccggtgcttgagagcctcgcaaggtcccggagaagtgttgttttgccggtttggggcggtccgataatcagcgtattcagccagctgtcttgatataagtatggaagcagcggctccgcaatccccagcttttcccgggcaattcgtatattaaaagatgcgatgtcacggaggcctttcacacctccgttttccgtaatgactctgcccgccagtccgactctgtggccgcctctgatcgtgacataccctttcttcagctcttcttcaagagtatacatactatagttgctaagccggctcaggatcagatgggcatcctctgccgtgcccgcataggacaaataaacaggttgtcctcttcgaatcaattcaacagggcggttgatccgaattctgacttcttcgatttccagccattgttgttccggtatttcagaaagggcgtttttcatggattcggggagaacctcagcgatttcattcaacagagcctcctcctttctaccgattggcttctttaaaatgtatgatgtgaggcagactttatgacaagcctctctttatttatgaacacccgccaaaatcaaaacaacacccgtaaaaatcagaatcagctttgcatacgaaagctgcccggcaatttggtagattccgacagtcatcgtaatgataaaaatcaacggaccgacaatagcgagaatgctgttaaccacaaccgccttccggacatcgttggtcacaagcatgacaattgctgccgtcagctcaatcatagaggataaaactcgtaatcccgccattgttaaaacagtagaattgatatttccaagtaaaaatttcatagcactctcccaacctcccatttttttatatgatatgctctagcttggtgaagtagtcttgtcattttcgtataaaagaaagattctgtttttgggcacaaaaaaagcctgctcccatttgggaacagacttctttttttctttctatgctcttgaaacgtaagaaccgtctgatgtattgacaacaagtgtgtcgccttcattcacaaagaacggcacgtttacaacaagcccggtttcagttttcgcaggttttgtaccgcctgacgctgtatcacctttaataccaggttcagtttcaacaactttcagctcaactgtgtttggaagttcgataccaagtgtttcatcctggtacatcatgatatgcacagacatgttttctagcaggtattttaattcttcttcgatttgagttgcgctcagttcaagctgctcataagaagaagtatccataaatacgtgctgatctccgtttgcatatagatattgcattgttttggtttcgatttgcgctttcgctactttttcaccagcgcggaatgttttttcctgaatggcgccagtgcgaaggttgcggagtttagagcggacaaatgccgcaccttttccaggttttacgtgctggaagtcaacgacgcgccaaatgccgccatctacttcaattgttaatcctgtacggaaatcgttaactgaaatcatgtttaatgtcctcctatattccaatcacaaaataataagttcttttggggaatgggtgattgtccggttgccgttttctgtaatcacgatgtcatcttcaatgcggacaccgcctgtttctggtatgtaaatgcccggctccactgtgaccaccatacccggttcaaggatagctgaagatctgacggataatcccggagattcatgaacttccatgccgagcccgtgcccggttgaatggccgaaatagtcaccgtagccttttacagcaatatgatcccttgtgagggcgtcagcctcttttcctgtcattcccggcttaatatgtgcgacgccaagcgcctgagcatcaaatacaacctgatagatctccttcaattgatcactgggctgacctacagcgaccgtccgggtaatatcagaacaatatcctttataataagcgccaaaatcaagcgtaacaaggtctccgctttcaatcagtttgtcactggccacaccgtgcggaaggcttgaacgaaggcctgaggcgacaatcatatcaaaagaagagctgtctgctccctggcttctcatataaaactccagctcattggcaacagcgatttcagaaataccgggtttcataaacgtcaagatatgtctgaaggcatcatctgcaatcttcgcagcttcctctaatatcttaatctcttcactagacttaatcaagcgcaacttttccacggattcagccacaggcactaattcggcatcactgataacggcgctgtatgaagcgtaagtgccatatgtcatgctgttctgttcaaagccgagacgcttgatgccaaacgattcaacagtgtcggcagtggtctgaatcaagctgccaccatgttcaatgatctcaaaaccctttacctgaaccttcgcctgctcagtataacgaaaatccgtaataaacgctgctttgtcacccgatataacagccaaacccgccgaacctgtaaaccctgtcatatagcgtacattcgtgctgcttgtaatcagcatgccgtcaattcccagctgtccaaacaggtttcttaatttctctagcttcatcttgattctcccccttgctggcttaataagtagcgaacagcaagcttgtagccttcagctccaagaccgacaatctgccctttcgcaacaggagcgataaccgactgatgcctgaattcttccctggcgtataagtttgataaatgcacctctaccacaggaagactgatgcttgaaacagcatccctgatcgcatagctgtaatgactcagggcgccggggttcagaacaatcccgctgtattgctcctcagcctcatgtatcgcatctatcaaatcaccttcgtgattagactggaagaaagtgagctggatatgtaaggcttcagcaaactgaaaaagatctgtttcaatatcggtcagtgtctggcggccgaatacttcaggctcacgactcccaagccggttaacattcggtccgttcaaaatcaaaaaatgaggcacataatctctcctttttgcgagggtttctcatgtaaaaaatgttcacttctcgtgaacattttatcatactggaaaaggattatacactattctctatgcattcccagcgcacgtgcaagcttttccgaattcagctcattgtattcaaatgaaatggaatacccgacaaacagcccgtaaagcaaataaatgcaaatggtcgtaataattgtatctgatgtcagttcggtcaccgtgcgcacatctggaaaaatcggattaaaaacaaaaaacacgagcagccaaagcaccaagccgtataaaatacccggccacattgtttttaaacgtttcaatagaagaaaataaagaaatgctgcgccaattgaaattactccaatcaaaatgatgctgattaccgttcccagcccatgttttttccactctccgagcacaaacggctgcaatatcatattcgggctgatttcggaaaaatgaaacaaatatgcgatataagcaacgaaactccaaagtacgcctccgcaaaaacctgttgccgccaccctgccggccattgaaacaggcggcttttgcttctcattcaattcttcattttgttctgtatctttttcgcttgtcatcatggcacctccagttaaagtgtgcccaaaaaaagaaatgtcaataaaaaagctcacactttttgacagctgcgagtaaaatttgaaaataacgggtataatgcatgtagaaaaagcaaggctatggcaattttttcagcttgtcaatctagaggtttagcgctgtttcctgtacaatagagtgaaaggaaatggttagcaatcctaaagaaataggcaggttgataatatgtcaaaacataaagttccgcccgcttacggcgggcaggctgttgtggaaggcgttatgtttggcggaaagcatcattacgttacagccatcagaagaacggatggaagcattgacttttttaagcttccacgcaaacacaacccgaaactgaacatcgtgaaaaagatcccgtttttacgggggatcgcggccattatcgaagcgagtgcaaacggcacaaagcatttgaatttttcaagcgaacgttacgggctcgatccatctgaagacgagacacttgagcaggaagaaaaaaaatcctccgggctgtctatgtatctcagcctcgcagttataggcgtcctatcatttttgttcagtaaattcgtatttacattggttccagttttcttagctgaactgacaaggccgattttttcctcggacacggcgcaaatcgcggttgaaagcctgtttaagttgattttgctgctcggttacatctattttttgtccatgacaccgcttattaaaagagtgtttcaatatcatggagccgaacataaagtcataaactgttatgaacagaatttgccaattactgtggagaacgtccaaaaccaatctcggcttcattaccgctgcggatcaagctttattttatttacgattattgtcggcatgtttgtttatttactcgttccgacagatccgctttggctgcgtgttatagatcgtgtcgcactgataccggtcgtgcttggtatatcctttgaagttctgcagctgaccaacaaagtgcgtgacattcccggtctgaaattacttgggtacccgggactgtggcttcagctgttaaccacaaaggaacctaaggatgaacaggttgaagttgccatcgaaagctttaacgaacttctcagactcgaagcattgtctgagcaaaatcagaagccttctcacaacgtcatctaaaatccgttgccctgctattactttcggaggtggacagttatgaatcatcgtgtacaacctattattgctgtattaattgcgctgggagcgttcggtttcctctatgtgctggtaaccaatcccggagaaatggcaaaaatggcggtaaccgtcatcgtggcaggtatcattatttattttattgtgaaatatgtaatgaatcgaaatgcgggcagcgaaggagcagccttcaaaaaagcggcgaaacaatcgcggcgccggatgaaagaacataaagcaaaacaccgcgccggacataagggacgtgtcagccacctgcgaagcgttccgagcgccagcaagcctaagccgatgattctcaagaaaaaaagccagactcagctgactgttatagaagggaaaaaaaataaaaagaaaaacagagcgcttttttaataggtccactgctttaaaaacagctctgtccgtcttttacctagctcaatcagggctagttttttttgttgtgttaaatgaaaatcagttgccattacgccatcaaccgggagaaaaatgatattttgttcatagcgtgatgcaatgtgccttgcgtcatgggcatccttcatcgtttcaaacagggcgccgaacagttcaaaagcgttgcggatattttttttcggacgctctctttcacgcggcgcaagcgtcacaccgatcacagggcgctttctttcctttgaaaacagccagatggggaaattgcttaacacacctccgtcgacaaccgtggcggtgcctgtgtccgtttttaattttatcggttcaaaaaaatacggaatgctgcagctcattctgaccgctctggcaaccgggaacatatcgggatttaacccgtaacgggccaaatcgtccggcaaaacaatcatggtgccgtttgtcagatcagaagcaataaggcgcagagaccctttctgcaaatcgccgaaaacccttatgcctttcgctcttaacagatcagcaatccattcttctatcgtatcgcctttgtataagccaagacgccagtagatggacacccactggagcatttttaaggggagaaaagagtacctttgatccagcaatttctctccgtccacttcttcaattaaagcgtggatttccttactggtgtaacctgacgcaatgaaagcggcaataatggcgcccgcgcttgtacccgcaacccttttaaagcggaagcctttttcctcaagcgcttcataagcgcctgcaagcgcaatgccttttactcctccgccggaaaacacaccgtcaatatacatctcattccctccccctccatccgatcgtttattaccattttaagaaaacacgcgcagaaatagaccaactaatgacgggtggcgtcagcgtatcaaaaaagacggcctccttcgagaccgcctttttactgattatgatgttctgttttcttttggattgatttcagatcttttttacgggcatcatcttcttcaaaatattgaacaagatccccgatgcgatcaatactgttccagcttaaatgatgttcgattccttcgacatcgttatatattttctcttcatcaacaccaatgattcttaaaaactgctcaagcaattcatgtctgtataccagccgtttgcctatttttttccctttagacgttaacacgagaccgcgatatttttcataaattaaatattcgtctttatctagtttttgaaccatttttgttacagaggagggatggactgccaatgcttccgcgatatcggaaactcgtgcatatcctttttcttcaatcagcatataaatctgttcaatataatcttccatacttggtgttgtcatcgaaaccctcccaaaaagcaccttaactttataaaccattacaagtttacactaatgaacttgaaaaaacaaggatgctccgcgggtcaaaagccctgtttaccgcttataattccattcatctgaagcgtactttgtttcagccaagtgatgaacaaaatcaagctcttcctgagaaagttcatatggctccaaatgaatgttaagacctgtttcaaatccttctttaaaggctttacgagcctcatccatcgtcacccgcttttcggtgagttcattaatggcaaccgctttgtttttgaaattgcgctgcatccgctctcttactctttcacttggatataagaacagatcgaacagcttgtcctcatctaaatcaagaagaatggagccatgctgaagaatcacacctttttgtctcgtttgcgcgcttcccgccaccttgcgcccctcaaccactagttcataccacgaaggcgcgtcaaaacaaacagatgaccgcggattttttaagctttctttttctttttcagttctcgggatggcaaagtaagcgtccagaccgagatttctaaagccttgaagtatgccttctgaaataacccggtaagcctcagtaacagtcgccggcatctcggggtgctcttccgaaacaattacgctgtatgtcagttcctgatcgtgcagcacacctctcccgccggtcgggcgtctgacgaatccgagattatatttatgtactgcttcaaaattgatttcctttttaatattttgaaaataccctacagaaagtgtcgccggattccagccgtaaaaacggataaccggggggattttcttttcgctgtgccaatataaaagcgcttcatcaagcgccatattgaatgcaggacttgcattgcctgagtctataaaccgccaagtttctttttgcattttaagaccttccttaccgttttaatagaatcagtttatcaaactgtcgggaaaatgaaaaatattttagttccattatagatgacaatcacgctgtgctttactataatagtatttgtcgaaaacggctctatgaccttgttttatgaagcagggttttgattttatatgctaaaggagtagaatcacattgtctaatatgatcgttttgattatttttgctgcgtttatcatctatatgattgcttcatatgtctatcagcagcgaattatgaaaacacttaccgaagaagaattccgcgcgggttaccgcaaagcgcagcttattgacgttcgtgagccaaatgagtttgagggcggacatattttaggcgcccgcaacatcccgctttcccagctgaaacagagaaaaaatgagatccgtacggacaagcctgtttacctgtactgccaaaacagtgtccgcagcggacgcgcggcacaaaccctgcgcaaaaacggctgcactgagatttacaacctaaaaggcggctttaaaaaatggggcggaaagattaaagcgaagaaataaagcaaacagctgtctggtagacagctgtttttatttatctttctaccgcctcgtatctgagcaccgggtgtctcgccgcttttgtttcatccattctttttacaatcgttgtatgcggggcctcctgaacaagttccggattctcctccgcttcttttgcgatttgaatcatagcatcaataaacgcgtccagtgtttcctttgattcggtctctgtcggctcgatcatgatgcattcttcaacattaagcgggaaataaatcgtcggcggatgatagccgaaatcaagcagccgttttgcaatatcaagcgtacgcactcccagctttttctgccgcttccctgataatacaaattcatgcttgcaatggcggtcaaacggaagatcgtaataaggcgcgagttttctcatcatataattggcgtttaacactgcgttctcagtaacagcctttaatccgtcaggccccatggagcgaatatacgtatacgctctcacattaatgccaaagttgccgtaatacggcttcacacggccgatcgcatgagggcggtcataatcaaacgtaaagcgcccttcttttttgactaaaactggctttggcaaataaggaatcagatcttgttttacgccgacagggcctgagccggggcctccgccgccatgagggcctgtgaatgttttatgcaggttgaggtgcaccacgtcaaatcccatatcaccaggtctcgccttgcttaaaacggcatttaaattagcgccgtcataatacagtttcccccccgcttggtgtacaatttccgccatctctgtaatctgctcctcaaacaagccgagcgtgttcggattcgtcagcataagagctgcagtttcttcattcactgctctttttaaatcctctaaatcaacaagccctttttcattcgatttcaccgtaacggtttcaaagcctgctactgttgctgatgcaggattcgtcccatgcgcggaatcagggacaatgaccttcgtccgcttgaaatccccgcgagcttcatgataggcacggatcatcatcagccccgtccattcgccgtgcgctccggcagcaggctgaagcgtaacctcatccattcccgttatttcttcaaggtgtttgcttaaatcatataaaagctctaatgcgccttgcaccgtgtcttcatcctgaagaggatgaatcgcagcaaaaccaggaatacgtgcgattttttcattgattttcggattatatttcatcgtgcaagaaccaagaggataaaaaccggaatccaccccgtgattgcgtttggacagcgctgtataatggcgcatgatgtccagctctgaaacctccggcagcgctgcgtcttcgtcacgaatataggtgtctgacaagaggtcccccaattcgatttccggtacatcgagctccggcagactatagccgattcggccttctcttgaaagttcaaaaataagtgcctggtcctgattactcatggcgatcccccaattcctgaatgagtgcgtcaatttcttcttttgttctcagctccgttacagcaatcagcatatggcagtccagctccggatacgtcaacccaagatcatatccgccaatcatgccttttgccagcaaacgcttgttcacagctctcaccggctcatccagtttgatgacaaattcattaaacatcggcccgtcaaacataacagtaaggcctgctttttttgcttcttgctttgcatagttggcttttaagagattttggcgggctatatcttttacgccgttttttccgagagcagtcatggccactgatgctgcaagcgcatttaaagcttggttcgagcatatatttgatgttgctttatcccggcggatatgctgctccctggcttgcagggtaagcacaaagcctctttttccgttttcgtcttccgtttgtccgacgagacggcccggcacctttctcattaattttttagtaacggcaaaaaagccgcaatgcgggccgccgtatgctgaaggaatgccgaaaggctgcgcatcaccgacgacgatatcagactgaaacttgcccggcggagtgagaagacctagcgccagcgggttagctgaaacaataaacatggatttcccttgatgagcgataggctcaatatcctttagcggctcgatcctgccgaaaaaattcgggtactgaacgatcactgcggctgtgttctcgcaaacggtttggcgcaatgcatcaagatccgtaacgccatccgcagcgggtacttcaacaacatcaatatactgaccttttgcgtacgttttcagcacctctcgcgattcaggatgcacggtttttgacacaacaatttttttctttttcgtgtggcctgaagcaagcattgctgcttctgccaaggctgttccgccgtcatacatcgaggagttggcgatatccatgcctgtcagttcacagatcatcgtttggaattcaaaaatagcctggagctctccttgtgaaatctctggctgataaggcgtatatgcggtataaaactcagagcgcgaaatgacatgatccacaatgacaggctgatagtggtcatatacacccgctcctaagaaagaagcgtattgtacggtatcacgatttttagaggccagctttgtcagttctcttgttaattctgtttctgatttcgcttttttgatttgatactcttttttatatttgacgttttccggtatatcagcaaataaatcatcgatgctgcttacgccgatagtagcaagcatctcctgtttatccttttctgttgcgggcaaataacggtgcttcatgtgttgtctcctctctccaagaaaaaatattagcgtttataaaatggtgttttgacaacctttgctttcactaattttttgcgaatctctacatctacaacagtcccgatctcacttgtttccgaatcaattaaggcaaggccgacgtttttccctaatgtcggtgactgcgtgccggttgtcacctttccgacagacttgccattttggaaaacctcatatccgtgccgcggtatccctttttcaatcatttcgagaccgacaagtttgcgcttcgctccgttttctttttgttcactcaatactgacttaccgaaaaagtcagactccttattgtgctttacagcaaagcctatacctgcttcaatcggtgtaatatcccgggtcagctcctgaccgtagagcgggagcttcgcttcaaaccggagtgtatcacgtgcaccaagaccgcatggaatcaatccgtatgcatcccctgcatcgatgatttttttccaaatatgcatagcatcatcactgcggcagtaaatttcatacccgtcttctcccgtatagccagtgcgtgaaataagtgctttgcggccgctgatatcggcttcatcaataaacgcaaacggctttaatgcagacacatctgcatctgtcagattttttaagaccgcttctgctttcggtccctgtacagccaagagcgcgatttgatctgactggttgtcaatctgtacatcacctgctgcatgttctttcatccaagccaagtctttatctatattagaagcattaatgacaagcagatagcggttctcttctttttgatagataagcaaatcatcgacggttccgccatccgggtaacacatcgctgtatattgagcacggcctggcgttaacgcggaaacatcatttgtcatcaatctttgcaaaaaagacagactgtcgttccctgacacttcgacttctcccatatgagatacatcaaacaaaccggctgcagttcggacagcctcgtgttctttttttatagaagaaaattgaacaggaagctcccagcctccaaaatcaatcgtttttcctccatattccttatacaggtcaaataacggcgttctgttcagcatctaattcctcccctttatcaacggcgcagctaaaaacatacaaaaaaggacagagaaacacctcatgtaaaatgaaggttctctgtcctggcacctgaaagtttactttgcatacgcaaagacgtcccctttggtggtttgcgcatccgcacaaacactctccagagttgcgtcgagcaagagttcttttgcctgagagattcactccgcagtttgctccttcggcgcctgtatcccgaggttttcggtcaggtctctccccttgctgtcattcgctcatattttcatgctgttatggacatactatagcaatatcttacatcaaatacatactcatatcctaccatcatcactatatgctgggcaacagcaatttgggcagatttttcttatattattcatcttaagaatcgaagaattagaaaggcggtttcaaagcaatgaatacagaaatgatctacgatgcaaaatggcctgaagaatttgctgaaagactgaaaaacgatggcccttgggcaaactgggaactgtacaagctctctgcagaaatccagaaaacattagcaattccagattttgaaggcttacgggctcctttatatctgccttcctttacgccgctcccccaccagcttgaagtggcgcaaaaagtggttgaaaaaatgaacgggaaagcgattttagcagatgaggttggtctcgggaaaacggtggaagccggtttaattttaaaagaatatatgattcgcggattagcaaaaaaaattttgatccttgtgcccgcttcccttgtgtcacagtgggtcaaagagcttcaggaaaaatttttgattccggctgttgaacaaaagaaaagctatgtgtgggagcaatgcgatattgtcgtctcatcaatagacaccgcgaagcgctcgccccatcgagaaatcgttctgtctatcccatatgatcttgtcattattgatgaggcacacaaactgaaaaatagcaaaacgaagaactatgaatttgtccggaatctcgtaaaaaaatattgcctgcttcttaccgcgacgccaatccagaaccgtatcgaagagattttcaatttggtgtccttattaaaacccggccatttaggcagtcagaatcactttcaggaggagttcgccaagaagaaatccagtttagaagcgcatgaacatttaaaagatcttgtgaataaagtcatgatccgtaacaggcggcatgatacagggctgaattggaaacagcgccatgttgaaacagtgccgattcaattttctccatcagagcaggcgctttatgatgaaatttctcgcttgaaggaaagtatcaataaaccagccagcatgttctcgattatgaccttgcaaagagaatgctgttcgagcagagaagcggtgtatatgacgctgaaaaagatgctagatcaaaaagagaaacaagcacctgccattgatgaggatacgatttcagttttaatagatcgcatcaatcaagtgacacaaaactctaaagcgcttcaagtcgttgatttgatcaaaaaaatcgacgataaggtcatcatttttacagaataccgtgcaacccagatttatttgcagtggtttcttcagcaaaacggcatcagttctgtgccgtttagaggcggatttaaacgtgggaaaaaagactggatgaaggatcttttccgcgggaaaatccaagtccttattgcaactgaagcaggcggtgagggaattaacctgcaattttgcaatcatatgatcaactatgacctgccatggaacccgatgcgacttgagcaaagaatcggaagaattcacagactcgggcaggagcgtgacgtgcatatttataacatggcgacaaaacatacggtggaagagcatattctaaagcttttatatgaaaaaattcatttgtttgaaaaagtggtcggtgaacttgatgatattttaacgaaaattcaagtgaacaattttgaagagcatctgcatgacattttgtatcactcagcaacagaagaagaaatgaaaataaaaatggataacttaacctcatttttgtcttataaaaaacagcagcctgctgaaaaaagaggatcttagcctgtaaggaggttttattagtgagacagcaagaggttcacgattttctgctgcgtttttttcaagcaaacagctgccaaatcgtcgatcaaggcttaggctatatgacagtgcagcttacagttgaaatggacaaacaaatcatgaaccgccctttctactggcattggcgcgagaagacaggcggtgatccgaatccaatgaaaatcacttttattacagataaagaaaatgcgccaaaagacctagatggtgaatttatatattttggggccccgcgtctttttcaaatatttaaagctgttaaacaaaatgggagatttaccagaatgtatgagaaaattgaatcagccggagctaaagtcccacttcagccttggcttggtataaatgtcacgatttcataccagtccgacatgaaaaaggataagttattgtcactaggtcttcacctagtctctggaacgataattgaagattttcaaagcaagctgacccagttttcactgacgtctcaaatatgtgactattgcttcaccatttcacctatgatcaaaccagaaagcggacttaagcgtatggaaaactatatttccaaatccgctatgcaggagccatccgactgggcggaacaggcggttaacaggtggaagaatgatatgacattgcttgataagttttacgagcatatagaagaaaaaccagaagaataccatctagaaaaacaggcgctgaaaaccttgtatcaaccaaagatatcagttgaaattgaaaatggcggattgttttatctgcaaaataatatttcaagctaacttttttaccattcgacatcattctcgttttttttgagaaaatacgattataataaaggtatattggaaaaaaattctggtgatttaatggcaaatgacttccagagactaatgaagcatacaataagtcatggccggactggctgaaatacataaacaagtattttaggaggagaaactgcatgaagaatgcaaaacaagagcactttgaattggatcaagaatgggttgaattaatggtggaagccaaagaggcaaatatcagcccggaagaaatacgaaaatatttacttttaaacaaaaagtctgctcatcctggtccggcagccagaagtcataccgtaaatcctttctgaatgtgctataatatcacaaggaaggtgatgacattgattggccagcgtattaaacaataccgtaaagaaaaaggctactcactatcagaactagctgaaaaagctggggtagcgaagtcttatttaagctcaatagaacgaaatctacaaacgaacccctccattcaatttctcgaaaaagtctccgctgttctggacgtctcggttcatactttgctcgatgagaaacatgaaaccgaatacgatggtcaattagatagtgaatgggagaaattggttcgcgatgcgatgacatccggggtatcgaaaaaacaatttcgtgaatttttagattatcaaaaatggagaaaatcccaaaaagaggagtagtgcctgagcagaggcactaactcctcttttgtcaataaccatcgagacggcccagtatatgaatactgggccgtctctttttatggctgttattaatttttatcctcgctgtgcgctttttcattttctttcacataaccgtctttatcagtatggtcctttttgattgtcaagccgttccactgtgtagcttcgaacgagaattgaagcttaatggagttgccttgatatttattttgaaccataagcccgttttcatcttttgttttatcatctttgaattggatttccatttgaacctgatcgaagtcagttggtgtttttggaacaccatcatattcaggagcggttttaccgtcaattgttgctacattgactttaccgcttgcatttaagaatttagggtcaatttgttttttgattttttcagtagccgctgcatcatttttagcagacatcaaatacaagtctttaaggttcgcatcatctaaaataatgtttttcgggtaaccattgccgccctcttttccaactgtcaacaatgtcacttcaaactggctgaggaaatcttctggagatgtattgctgccgccgtttgctttaaaatctccataattaagcgccattaaaacttctttgatcgcaagtgatccgttattttcaaattggaaatcctttgtcaacttatctcccggctttagatttgataagttcacactcgctgaattctctttagcagataaatcaagcgtacctgatgcaaaagtagcatcctttgatttaatgtcgttaaatgctgcccatgttcctcctccaactaaagctaatcctagtgctgcagaagcaactcctaaactcaatttctttttcatacccatggtaaactccccttttattgaatgattttatatcgaaacctgttgccaggtttacaactgaagttaagtagacatggtgctgtcctttgtatctgtttccaaggcttttgtctttctttcaatttctctaatggcgctgctgatcgtcacaaaagcgtacactaacagcatcacgccgggaacaatcaataatacagccgttccaatcggctggctggcaaaatgaagcatatagcctgcatatggaagctgaaaacctgtgtattgtgcgcgaacattttcgtccgatacaggcgctgaatcagctgctgcattattatcaccttttgttttaaataacaaatggtctccttgctttgttatgtcaacaattctgtgggtgacagccgtatttgcatcctgcataaatgtaataacgtcacctttttgaagctctttcacatcagcgatttcttttaccaatattaaggaacctgtattgaactccggctccatcgaacctgacagaactgatttcagcgtatacccaaacaccgccggctctcccccggatgaacgtgttgaaatcacgacaagtgtcagcacaataataagagtaaagatgatcacgtataaaatattactgatcagcttcattgcttttttcatcctcttccccgctttccttctggtctgattgagtttcattttctttggttacagcttcttgagatgtttcttctttcattgttttttcctgtatatccttttgtgttgtttcattctcctttttgacgtccgactttgtttcttttttagggactgtcggtttttcatcgcattttgcaagcgtcataggctcggaccactcaaatgtactgccgtttgccgggtagcctgccggtttatatactttaaatgcataaatgccgggtttcatttttttcttcgtctcaattttataaagtgaatcgccgatttgattggagacaaatcctttttcgatcacgttcccatcctttaacggtttgcgggcattttcaagcttatgaagctcccacttccactttgatttcttaagtttctcacctgtattttcgagcacagcaaataaggcgaaaggtgagcatacagtgcctttcgtatccgtttgatctgatatgtgcaaatcactttgatcccagcgtttatcataatggcagtttttatctgtatgctgaaagtctttacacgtttgaagtgagacatcaaatgtttcaatatcatgaaaagcagcgcttgtatcatcggaaaattgtaagcatattgcggcagtcagactgaaaatgactgaaagctgaaagataagcagaactttcagtttcgtcttcgccttttgctgattgtgaaacaatcgaaacatatcttacctcctgtaaaacactgtaacttgatatgacaatcgttctctttaaagaactccacaaatagagtataatcaacgatttatagatttaaaaacaccgaaatcgctcatttcgttcgtttaaaagaatgttttcatcatattacaaagtcttgctcagtattgctcattttttcaattttttagaaatttttgggattgttatgtgagaatttaaatgcatatcccattattatttggtaataataaacaaagaaagggtgacagcatgatgatcaaacaatatgtgatttgtctatctcttctcgtctttggcaccacagccgctcacgcagaagaaacaccgcttgtaaccgcccgccacatgtccaaatgggaagagattgctgtaaaagaagcaaaaaaaaggtacccgctcgcacaggtactgttcaaacaaaaagtatgggaccgtaaaagaaaagatgaagcagtgaagcaataccatttaactctgagggaagggtcaaaagaattcggcgtttttgtaacgatttcatttgatccttatagccaaaaggtcaataaaattgccatattagaagaatatcaataaggtcctccattttttgaaggaccttattcatttatttgcggttattttttccgtttcagccaaagtcggaagccatagggtaaaataccgaaccactgctgggaagcaggcgtttttgtttctttccacacctcttttcgttcttttcgctcatctctcggagtatctatatatttgacaaattgctgcgtcatatatttaacataatcattcgttttcacgtgatcacctcatcattcaattattatgagtgttgtctcacatgactttttttataccctttacactgttttattctgtccatctcagcagctttttctgtttttggtcaaacacgatctgtgcagttctttctgttcccgactccgttgacactcttaagttgatttctttttgttcttttatcgatgtatcatgaatgtaataagaaacccgtccatatggaaattgctgcgtaccctcctggcctttccgttcctctagaacatgccgaatcgaaagaagcaccccattttgaagcaaattctctcctatgtataactcttttgtttccttctcaaacatgcagcgtgaaatatattgagcagcagcaaagttcacgattaacagcacaagcgctgacacaaaaagaacagctgggtaaataaaccctcttgtacaatacattcacccccctcctaaatacgaatagactggaaaagcagtttgatacactttttggtcctcactctcaattttcagcaaaacaacacaattttcaaaatcagctttcatggcagtaatatgatctaaaatcggaacatgccctttaccatccactctttttcttatcattgaatgataaatttcgaaacggatgtcctgcccggaaagattggtgcagattaacacgctcccatgctcggctgtcttaactgcctgtgactccttgcattcattcatcatctgttctatcgaaatcatccattcttgctgtgtgaaaccgtcatgttcctgctgtcgagacaaaaacagatggaaaatcgcagctaacgatcctgatatgagcaaaaagactgagagcgaaaataatacgttaagaagcgtatagccattctgtctgcaggatgctgaggcaatatgatttctctttataagctgtggctttgatacatacgttttgatattcgccctcctcctcccacttcattgcatagatatgattgttctttgtaattgtttttgacgcggctccttcaccactcatgacatatttgctaatgctctcattcatcatctgatagccgatttctcgtgattccgccattttttcatcagctatcagcttgtcccacaaggggacgactgtcagcagcacaaacagccacaggcttagcgcagacattgtttctattgtagaaaaacctttattttctctccacattgactctcccgctccctagataaactgttatatcatatacggcatggccatttactcgtatttttccgcctgcattcgggtgccctttctcattaaattccaaacggtcttttaatgtcagcagttctatagaaagtccccttgcatacggacgttcaatgaccgtatcaccaatgactaattgatattcttttttatgaaagaaaatttttgttctttgttgacgggaaatagcaacctgctgtgtgagcataatatcatttttcagctgccttgctgcctgtcggacagctgtattgtcataagcaggaggaagtgtagtgaagacggccaccaggaggatagaggcaaggcttaacacaagcaaactttctaaaagggtaaacccctcctcctcgtttaatttaatgttcaaccttaacttctccgccggtgatgataatgcgcttaccatttggacagacagcatcgtttttcacatagccctctgactgtaaatcggcaaggctcggagtttgtccttcatgatcaagctcaaatgcagtcatttgtgccttaaccatgttttgtaagccttcacagccctttttttgaatggtttggttatgtttcgtgacgttcggtatcgtaattaaaagcaaaatcgaaataataaagagcacgattaacatttcaacaagtgtaaatcctttctcattcattagcctcttcctttcacatttgattcatcatctgatacataggcacaagcatagataaatacacaagtaagatcatcgctgcaacaaatccataaatcattggctgaaggatgcctgtccatttttgcgctttgtgttccagccgctgtaatatgaattggctgtatgtgaaaagctcccgatccaatcggccgctcagctggccgtgagatatgacttttgataaatcagtttcataaaaagggcttccacaaatagcggattcaattgactcaccggcttttagccgttcaatcaattgttcagcctcgcagcggtagaaagggagaaacgtttgatgtttaaatgcattaaggctgtcataaattgagaggcctgattttaaaaggctgcttagctgcaaagaaaaaaagtagctgttaaacagcttgacaagctttccaaccaaaggaatcctgatacaaatcagcatttgccgggcaggtgattttttcttaaacacaagccaataataaatcccgatacctgctgtaaaaagaacaagcaaaatgatcacaagatcaatatgctgaaaaaaagcaaaaagtatatcggttgaacgtgaggtttccatattcatcgattgatagataccggaaaactgaggaatgatgatggactgtaacatataaaacatgacagcgaccgtaaagatgaggaaaagcggatagcgcagcactcttttcagctggtctgcctgtgcaatttttcgttccagcagctctccgctctggatcatggaagcaggcagttcaccatgtgtttcagcaaaataacaaatacctacggcttccttatgaaatgacaaactctttagtacttgataaaacggagccccttccctcaaacaagtgaccgaatcagtcaagtcagccgcctgcctcttattcatctgaagttccatcaggcgtaatccatccagaagcgtatatccgcccgcagtcatttcaccgagcctctttaataacctcgcttgatcctttaacgaccagacttttctaatctttttcatgataaacccaccggtcatagttgtttgtcgttaaatagccgagcgcaattccttttctgataatttgacgaagcgtttgatattggtaatttgcatgatttccttttgcctcctggatacattgctgaagatttttcccgtatagaagctcataaacgctagctctcctggtatttcgtgactgtcggcaatacactgatgaacatccgttttcacaaaacgggcaagccaaatcaaccaagcgctgagccgctattgcaatgacagtctgttcgatttcattcatattgataccgaattcaagcagtctgtaaattgcgccctttgcgtctctcgtatgaaggctcgttagtaccagatgtcccgtcatcgctgcccgcaccgcaatttcagctgtttccgcgtctctgatctcacctaaaataatcatatcggggtcatggcgcaaaattgctttcagacctgcggaataagttacaccggctttttcattcacctgaacctgaagaacatcttcgtcccttgtttcaacagggtcctctaatgtgacaatatttcgattaaagtgtttttttgcatattgaacgagagagtatagtgtggtagtcttccctgaaccagttggcccggtaaaaatgagcatgccatgggaatgttttaaaaacgagagtaatgtggctcctgtcttcggaaatagcgacaatttatcaatcgaagggatattgtattggggcatcactctgatcacgaggctttcttcattaattgtgggcagcgttgacattcttaaatgaacatttccctctttcagctttaacgtaagcgaaccgttttgcggctttcgcctttcacctatatccattgctgaaagaaatttaaaatgtgaaatcagccttacgcactcttcttttttcatgtccctttttttcagcaaggcatgatcgacccgaaaatgaatgatagcgtcccgctccctcggcacaatgtgaatatcagaagcctttgttagatatgcctcttcaatcaagtttttgcttaccttttctattgaatccaatttgattccctctcctttcaacgcatattgtagaaaaagaagaaagggtaatcaaacaaggaaaacgtgattttgtgagatgttatatgctgaaaaaccaattctttctggcaagaaaaaaaattttcaactgaatgtgccgctgtcattataattttccctataaataaaaaagcagacatggtcaccatgcctgcttgattccattttcattatgctgttttcgctttttgaccagtatctttttcaacggaaaggtcgcctaatgcaacaataccggtcatttggtcattttcaagaatcgataaactgcggatttgatgctctgccataagcgccttgacatcgtatccggtcaccctgatatgtctggtgaaaaagcggggcacgctgcacaaaatatgaaacatcctatagagtccgcctttttcgaggtttctttttcttcttccgctcctgcagcatatctcccgtccagccttttttcctcaaatagagatagatcaggactgtagatgtgacaatcaataagagagaaaagagatatccgtatttccaattcagttccggcatcactgaaaagttcatcccccataaggcacccagagctgtaatcggcgtaaaaagcgtcgtgaaaatggtcagtgcttttacaatttcattccccctgtgtgaggtaatgacttcctctgaatgcagcagattgttaagctccccttcaaattcgctgatgtatgtaaatcccctgtcaattttcagttgtgtccgctgataatcctttttcccttcattttgaggtaaaaaggtttctttcaacgccatttcaatttttttggcgcttaatattaaatttttccaaatcatcagttcatggcgcaggagatggacgcggtttagaatgcttttgctattgtcgtctttaatttgccatctgagctttctcagctttacttcaaattcatcaacaccgattaaatacgcattcattagttcgccgagaagaattaaaaacccctctatcgcattgtccgctctttccatttgccggacaacttctttgcctttaatctctctcaaaatcgaaaagtcaaaattgattgtgaaaaaatattgtctggtgatataaaagtgaaaaacagtatggtctttttcttcaccaagcccctgatcataaacaatcgacccaaataccgcttcattttccgtttcagttgtatctactcgcaaaaaattaacgtgatggttattttcaaaccacttttcacactgaggccagtgagaaaaatggattagatctcttgccttacttctttcttgaggccccatttggtaccaaaaccaatcctttcctgtatgtgccttcatgtcaagatcctccaaacttttgttctttattctttaattgcccaataaccgcgtcactaaaccagtctgccgcttcaacacatgttttatgagcattttcaggtggtatggaatgtagaaagacatcggaaaagggaggtgcatgccttccttggagaaggcagttgttttggaatttatcaatttactagcagtcgctattctcattttgttaacaggattttttgttgccgtagaattttcaatcgtaaaagtgcggcgatccaaaattgatcagcttgtcgcaaaaggaaagaaaggttctaaagcggcaaagcatgtcatcactcaccttgatgaatatttatcagcctgtcagctgggcatcacagtcgcagctttaggactgggatggcttggggaaccgactgtgcaaactctgcttcgaccgctttttcataaagcaggcttaaatgaatcgcttacccacctgctttcactcgtcatcgcatttttagtggttacgtatttaaatgtcgttattggggagctggctccaaagagtttcgccattcaaaaagcagaaagcattaccttgttgttcgctaaaccgcttatttggttttataagatcatgtttccattcatttggctgttgaaccactctgcccgattgattacaggagtgtttggactgaagccggcatcagagcacgagctggcatatacagaggaagaacttcgggtcctattggctgaaagctataaaagcggcgagattagaaaaagtgaattaaagtacatgaataatatcttcacctttgataaacgaatggcaaaggaaattatggtgccgcgaaatgaaatggttagtttatcactagatgaagactccatttcaaatcttcaggaaacagtcaagcaaacaaaatatacacggtacccagttgtaagagaggataaagataacgttattggcgtgattaatatgaaagaagtgctgttttccatgctgacgaaagatttttcaatcaagaagcatcaaattgaacctttcgtacagcccgttatccatgtcattgagacgattcctatttataaactactgctgaaaatgcaaaaggaacgcactcatatggcgatcctcatcgatgaatatggcgggacgtccggtttggtcactgtcgaagatattatcgaggaaattgtaggagaaatccgtgatgaatttgatgcggatgaagtgcctcatatccgcgaacttggaaaggatcattacttgttaaatgcaaaattattaatcagcgatgttaacagcctgcttggaactgatttatcagacgctgaagtagacaccttgggcggctggtttttgacacaaaacatagacgctgagcctgaaagtaccatagaatatgatggctactcttttaaggtaaaagacatcaacagccatcacattttatttatagaagtaaaaaaagctgaatagcccgtgaaaggctgttcagctgctatctttcaagataaacatggcaaaggcatcaacactcttttattttaaaccctttattggccagggctttagcaagactttgctcggttttcacattcgaaaaatccagacccagcttcacgacagtttgggcaatttccggcctgattcctgaaataatcgtctcaatgccgagcaatttggtgctgtcaatcactttaaaaatttgataggctaccatggtatcaacgataggaacgcccgaaatatctaaaaataaatacgagagctttaacgctgagcactgctccagcacagactccaaaatcgtcctcgctctgtgcgtatcaatttcaccgacaagcggaagaatcccaattccatcagtaatcggcataatcggcgcactcaattcattaatcatttctttttgcgcgtttaattgtatcatggtcacctggtgatattcttccgtaaacacttcgatgatctcatcaatgttttgattcaagatccggctccactcataaaattcctgaatgctgatgtcttgagaagaagcttcgctgaatttatgaatccattcaaacatgatgtgcctgaaagtgttaaactggccgacactttgtgtaaccgtcacttcatgaacggcacggtctctggcgcattgaagagaccaccggttgagctcatcctctacgtcttcttttctaagggattttgctacgatggtcaccaataattcatgctggtcttttaacttttgttctagtttttgctgatctttcgctgaatacagccagctgcctgttgatgtacaaactttcagccattgttgcgtgatatcttctttgtgctctgttaagtgctgatcaagagctatcatcttaatgagctacctcctgtttttgaaaaatgtacgctatatatgtataacgcgtctgcctttacacatactatgtttagattcaatgggctatagccaagcggtaaggcaatggactttgactccgtgatcgttggttcgaatccagctagcccagtttctgaacaggtgaaaaaccgaagacaagctgattcgaataaatcagcggatcttcggtttttcatcatgcagattgatgaaccgttttcttcttcgataacttcaacagttctcccgggttataaccaatcaccagctttttgttgtctactagaatcgggcgtcgcaaaagcttcggcttctcgattaaaagttccagcacctcatttaccgtcatttcttcaatgtttaaatttaaatttttgaaagtctggcttcttgtcgccaaaatttcatcaattccttctgtcgttaacgataaaatgtactttaattcttctcttgtcggggtttctctgaataagtgccgttcgttaaattcaatttgatgtgctttaagccaatgttttgtttttcggcatgacgtgcagcttggatatgagtaaaaagttaattgttgttccattcgttttttcctcctcagttaaccatctctttgtagaataactacccggatcatttttcatttaaaccatttacagaacttttttcggattatttttttaaaaacattcatacaatagaaaacacaatcaaagggacaaattccatttgtatattaataatgaaaatgtttacatttctaggtgtgatccattataataacagtcagagggactctcgggaggggataaaaatgaatcgcatgttccgggtgttaggattttggacgggaatttttgcagtcatgttttatttaggtgatatgaaagatgcttcccttttattttttggacagacgatcttatttgtgtttctatcgtatttgaacttaaccgaacgcatgtatatttatatttttggcgcttatttaacaattttcttcgccggctttacatattactcaatttttattatggtgcccggcggcggaggccattaaatgcagaaagagacaaaccttatcggtttgtctctttttttacaatgaaaacccatttaaaaacggattttggtcctgctcagtcagtacgtctgtttcaggtccatggccgcttaacaccagcgtgtgttccggaagtgtaagcagtttttcatgaatggacgtcagcagcgtctcttgattgccgcctattaaatccgtacgtcctataccgccttggaacaagacatctccggagataaccaagtctgcatctttcacgtagtaagacacactgcctggtgaatgtcccggcgtaaataatgtttccaaatgaaacggcccgatattcaactcaccgtcgccttcaattagatgatctgcaggcttagctgttacttctatccctcgcagcatgccggagccgtttaaagaagcgtccgtaagccaatttttttcattttgatgcaggtaaacagggatatcccatttttctctcacttcatcaagcgccccaatatggtcaaaatgggcatgtgtaagcaaaatggctaaaggcgtcagccctttttcttttatgtattgattgattttatgtccctcgccgcccggatcaaaaatcaggcattgatcatcattgatgagaaaatatgcgttcgcttgaatcggccctactggcattcgtctccatttcactattatcacctctttcttttttatgctcttattatgagggttttttaaaaaagattcaaacaatcgcaatgaaaacgctatcgacaaacctataaaaaacaggtagaataaaactggaaagaattgcaggtttttcaatgtaaagggggctgtgttatgttacttgtcgtgattttcggccttgtcgctcttttcgctttatggggagtcttgcgttctgttagaaataaaaatatactcgggtttttattagccggtgccaccttatttgtctttggatggtttaccgtgatgaccgtaataaacagcgggtatccaaccgcacattaaaacctgtatccgatcggatacaggtttatttttatggctgtaaatgtttattgacactttctattttgctctcaagcgtcgtttttttgtcacgcctgtcatcgatacggatattcgttgccactctgtgcaatcctttttgaaatggcgcttcgtgaattgcctgaatgactgcaaaaaggtcactgagttctccctcgatcagcgtattcatcggtgtcagctgatatttgattttcccttctgcttgatatccttctaatatcttttgcacatcggctacgtaagcactgacactgggtgtttccgtaccgattgggataatggttacatctgcgatagccatcgttattccatctccttttgatcaatgatgagttgcttcgtttcatgtgatttcaataaaataatttgctcaaaatgaaagccgtataacgcatatttcccgttcggagatatttgaatcggctccatttcccgcagagacacaagatcttttgtctctcccgatgctacattgattgctgcgagcttatatgcatcgccgctttgtttgaatgtataaaacaggcttcctgcttcatcatagtcatactccattggagccaaacttgtatatttcgcttggagcggccatttcgctgtaacaggtgatgttgattgcggcgttttaaactgatacgtcccttttcctccggaagctgatttgacagtaaaactcatttgatggaaagaatcgaagaatagaacgttatcctcaagcttctgttccgtcttagaagctgtatcgaacgtatataaaggccctgttttatcgtctcttccctcttttacataatcaaatgtatttttggatgtccaatgaatgaacggaacctgtactgggcttaagaaagattcgtcttttttagcattcacctgatatgtatggaaatcccagttttcattgaattccgtcaccatcatttgataaggatcatactgattccaagcagcttcaagctcatacgtttcgtaatctttttcgtaaagcgtctctccttctgcattaagcaaaaccactgccgtcttttggctatgtgtgatttgcagcagaatcatctgctccctcgcattgatttgaacatcaacgatttgaccatccgtttgatagagctttttcgctttgcctgtaaagatgcggtacgcaaaaagctctgttttcgtcggattagacgcagtatataatattgtgctgttattcagccagccttccaccccatccgctttttccgcggaaagcggtatgatgtcttttttctcatcttttgccgccgatgcctgtttttgctgctgatgagatggttcgcatgccgataaactaaacagcaataccgccagcagaataaaacaaactgatctcatcagcattcccctccgatcatctttattctctcatatttgcttcggcagaaaaaagaaaaagtttcagttactcatgaaaaaataacgccctccacaagataccgcttgtggcgttatatatgtgtgaaaactgctgaaacggcaaaggattttggccttttccaagttccaccgtatacccttccttaaaataatggtgaataaaccagtcacgaaatccagcatagctatctatatcccttactcccttataaatgttcccgcttaactcctcaaaatcctttatgacggcagcagattcctcaggctcaaggcctttatagccccaataaatttcttctccttgagtatgaagagccagcagtctgtcaggcggattctccgtgatcagccggtacatcgcaatagattccggctccgtaagcggagagattcccggaaaatcgcggtagctgggtgctgtcggttttcggtatttttcaatttcccataatgatggaaattgtttatttaaatcaaccccgtttatattcgccttccattcattaaaatttggacgatgttcatttagcctttcgagttcatctcttctggctcccatgacttctgatccgtttaaaacaagatcaacgccatccggattgacaagaggaacgagggataaggatgtgctgttaaacagctttatgggagaaaagccaaagaaaggcgaattgcagcataatgacatacagtattccttaaaccattttagcaggacagacgttgtaatccactcattcgcatgaaatgacgcgttcatatggaccttttttacggcatgctccccaccagccttcagctcccagataggcctgccgagtacagaacggccaatttcccggcatgagacaaacggaaaaacatcaataatcttctttatttccttttcaacagctgaatcatcatagattttctcttgctcaatccagctatctgaaagtttcagctgccgaggctgtaaaaagcgctttatgtcctgaatggtttgaagctctttgccgctatgctcctctatcacataaccagggcaatacaattgatgtttttgtgcggagcgatttgcacttttaagcaattcctcgtctatcttcagttctttcgccacattggccaaattgttcttgatctcaggtttcacagtaataaacgccatcatcatcccccttttttgttactatatgacagcgtatttaaaaaaagaaagcctcccgctcacttcaatgcgggagacattgtgattatgatgcctgatcaagcatttgtttttctttccgctttgacgaattgtccagccttttctggtcataaaatcgcaacaaatccccataaatgatttcatcagaaagtgatagctcctgttttgctttatcagcaaatgcttcacattgttttgtctcttctaacggttttcccgtctctttgtcataacacgcaccgtctgtataaacaacctgatctgtgataaagctcccgtcccggagcaccgtgaagtccagtttttcgtctgaaagcagatcgttgccgaattgaatttgatctttcgtatcaatccctaaaagattcatcagcgtcggcctgatatcaatctgcccgcctactgtttcaatggtttgcggctttttatcagtaatacccggaatatgaatgaccagcggcactttttggagctgtacctcttcaaatggggttatttcttttcctaaaaactgccccatcgcttcattatggttttctgatataccataatggtcaccatataatacaataacagagttgtcgtataacccgtcttccttcagcttttcgataaaccgtttcagcgcctcatcctgataacgcactgtcggaaaatatttatttagcgtctggctgcttgaatcatattcatcaatcaattggtcctcttcatcaagatcaaacgggaagtggttcgtcagtgtaatcagcctcgagtaaaacggctgaggcagatttttcatcagctctgaagactgctcaaaaaattctttatccttaagtccccagccgactgaattttcgtcagttacatcatacgagttaatatcaaaaaacgaatcatatccaaatgagtcgtacattaaatcacgattccaaaagctcttattattagcgtggagcaccgctgaatagtatccgctgtttttcaaaatttcaggagcggccatatattgattgcccgcattcgtaaaaaatacggcacctcgtccaagcggatacagtgaattgtccacgataaattcagaatccgaggttttcccctggcctgtttggtggtaaacattattaaagttgtagctctgttttataaagtcattcagaaaaggcgtgatttcttctccattcaatttttcattaatcacgaagctttgcgtcgactctaaggatacgagaatgacgttccttccttttgcagcgccgaataagcgtttgttggcatccttcacattagcggttacgtagttttcaatctccgtcaggctgttgctgtctgccaacgctctctgtgcggattgctttgactgaagaacgccatcgtaaatatgaaaattaaacaggctaatgtttttaacaagcatttctctgtcaaatgagcgtgtcaatagctgaggtctttccgcctcagacaagcccaggttgaagaaataaacagaagcaacgaacaaaaaataagccgcccgttcatttttcgttgagggaatgtccgattgaaaagctttttgccggatgtgaagccatattaaaaccgcaatatctacagctaataggaggtctgtcggctcaagaagtgttccgatgctgcttccgagatcacccatattgctcgtttgaaaaagaacagggattgttaagaaatcattgtaaaaacggtaaaaaaccatatttgccagcaatacaaacgtgacaagacagctcatcgcgataatgtagcgatttctgtttttgccttttaaaaacaggctgaggccaaaaataagcaacaaaaaactcaatgggttgataaacagaataaattcctgtgttagattgtcgattttaatatgaaaactggttttgtaaacagcatacgttttcagccacatcaataaaatggcaatcagcataaatgaaatcttcgaaaaaaacgtttttcgcatttcaacctcctatgcagcacgctcaaaaaaatcagtctattcccaacattctcattaacacatcaaattaaatcttaacctgagcacaacaaaaaatcaatttcatttacacaattttaacaattttgatgtttcagccattcatttttagcgatccaagcgcctccgataacgccggcatcatttccaagtgctgcgattgaaatatcagcagcttgggctgcccgcggaaacgcgcatttgcggaatgttttctcgacttttgatctcagcagttctccggctctcgatacgccgccgccaagaacgattttggatggattaagcgagcttgccaaatttccgagcaccaaaccaagatgcttggctacataatcaaccacctcaagggcaatttcatcattttcacccgccgcttcaaacacatcccgcgctgacaattgttcggttgcttttaaacgtgtcgtctttttagcatttgctattttttcttttgcaattcttacaattccggttgctgacgcaattgtttcgatacagcccgttttgccgcagttgcagggcgctccgccttcagggatgctgcaaatatggccgatttctccgccggcgccatttataccatgtacaatttcaccatttgcaatgatgccgccgccaactcctgtgccaagcgtcacgagaatgacgtcttttgcgccatcacccgctcccttccacatttccccgagcgcagcaatattcgcgtcattttctataacagctgggatgccggtttctgtctccagatggtttttcaaagcataatttttccaccctagatttactgtttcataaaccactcctgccgccatatctacagggcctggtgcacccattccgatgtatttgatgatgtgcttcggtttttgcagctcatccagcttgctgtcgattgtttttgcaattgtgacagtaatcgtgtcgccggttttatcagtcggaacttcccacttatgctgaatttcgccatattgattaataaaagcgagtttaatcgtcgttcctcccaggtcaatgcccgcaaaccatatctcgtccatttttatcaccttagcctttataaaaatctcttccgttttttgtttgttccaattcttttcgaaggacagctgccgctctggcccactgctccttttcaatcatgtggttcatgtataattcctttaattcatccagcataaactcaatttcaagctctctgtctccaaaataaacaatgtggccaaacgtttttaacagctgctgcacatcataaaatgtattcattttcctcaccatttcttgaacttaactatcataagcgtattcataaggaagcggtcagtcaagaagaaaacgctgacaaaaaagccagcttcctttccatattccacctctatgattctttattgttttcaatttgccgctgcagctccttgtagcgctgctccttcggcttcagtttcacagccgtctggatggccttttctgcttgtgcaagctcatttttttccgcatacaataacgctaaattgtaataggaagcatggtctttaggttcttttttcactgctcgttccaaaagggaaaccgcctgatcatattcgccgatttgaatatcagaaacagcaagaattttcaaaagatcggcagaggcatctttttgcgctgcttctccgttcagcaattctgttacttcttcatactttccttcctgatacagctcgcttgcctgctgaatcagcgctgactcctggtgtgaaggcgaatgcaatccgtaatataaaaatccaacagccaaagcaatcagcaaaaccgctgacaacaatctttttccaaaggctccggctttaggcaaccccagtgctgctgcagcgaaaaagccgccaatcaagccgccgatatgtcctgaattatcaatattcgaaaccgcaaaaccaaagcccagattgatgataataatgacaataatattggttcctatagttcttaaaaacatttttcgattagacaaagcaacatacagtaatgcacctaagcatccgaatatggctcctgatgcccctgccgaaggatacgggctgaacacaaaactcgcaatcgaacccgtaatgccagcagccagataaatcagcaaaaatctccccgatccatacatccgctcaaccgctgtaccaaccgaccataaagccagcgtattaaaagctaaatgcgctatgccgatgtgaagcacgatcggtgtcagaagccgccaccattctccttgtgcaatcaggctgttttcttttgctccaaaagccaccagtgtctccgtattagtgctgcctccgtttatttcgagcaagaaaaacatcaggatctgaagcgcaataaataaatatgtaaaagtcggttttccgttttgaaaaaccgccgcttcagtttttctctgttcttcttgtttcagcactagcgaaaggaagcgttctcgcgccatttgcgcgttttcaaacgaagcgtgttcctctgaacaatcttctgtacgaaatgatggaaaaaccgcttgaagatcatctcgaagcatcgttcctctaacgatcgccggctcaactgacacagttcccttctcaaaagttttttttgcaatctcttcccagtcatcaacaggggcttccgttgaaaaaaacacattcagcagcttcatccttcgtctgcccaattgatgtctgactcgttctactcgttcggcctgctcttcgatgtctctaaccatttcttgacggaaatcaagatcgtgcttataaagacgaactagatcatgagaggacttgtccggcgcttccagccatatttcatctgactcaccggcttgtatgacgccatacccgctattcaccaggtgcgccgcaattttccaatatgtatactccagcaaaaacatgtttaccgctccaatagtttttttttcattataacagctggcgctccgaaacgcctactgaaagcaaaaaatcccgtttttcacgggattttagaaagcttgctgtataaacttattgcggataaatggaattcttaaaaacaaatggataaaagaccgcctgattcctggctggctgagtacagtattcataagacggtagcgattttgataaaacatgacggcagaaaccgcgaaaatggcatatatcaaaagttttttcatgatatccctcctgccaatagggtttgttattctgccttatttattctcgaataagggacaggaaagttatgaaaaacaagaaataatccgatcctctgttatcagcttatgtaccgggatgtcatgcggcaaacggggtacgtgcgcaaacagctggcactccaaaagcaaagagactgtctccccttcatattcacttaaatagcgatcataatagccgcctccaaagccgaccctaaacccgttaacatcaaaacaaacacctggaacgatcaccaagtcaatttgtgatgggtttacttcttttgttttttcaattaccggctcgagcagtccggcgtaaacggtttcgagctgatcatcggtcttatatgtccgaaattgcattttcttcgtgtccggatggcattttgggatgcaaacttgtttcccttcttcccaagcctgctcaatgacaggacgcgtcggtatctctaatcctctggagatggtgaccgcaatggtgccggcattttgccactccggcagagaaaacaagtacttatacatacgttccgttttttgaagcagatcttcatttgataaagcagacagtgcctccagcgtcttttttcttaattgtgatttcatctctcatccccctcggaatagaaaaaaagccagaacctttttcaaagctctggcttttttcttacacctcaaacagcaaagctgttattttgtttcacggtgtaacgtagattttttatcacgtgggcaatattttttaaattcaacgcggtctggattgttgcgtttgttctttttagaaatatagttacgctcaccacattcagtgcaagccaaagtaatattaacgcgcattattttccctccaaactaaaatcatttacttattcagacttatatataataccactataatggacggaatgctaggctgtttttcaatgaattgctgaattattgaagatacgctcataaagctgcaaatatgatgacataatgagtcgggggtggtggagcttgaacacttgttgtctgccagcttcttttatccggcgggctttttcccggtcttttaaaaagctgtccagcagatcagccgcttcctgtacgagcgtaaaattagcgatgattgccgttttgtcatgaacggcataatcacaaaaaccacccgactgagaaacgacagtcagcacaccttgttccatgctttcttgcgcggcaagcccaaacggttcataagaactagggaaaacagccatttcacattgagacagtaacgttctgatgtctttcctattgagaaacggcaggaacatgacgcgatccttcaggttatatgccgcagctaatttctcatagcaggacagagacggcccctccccagccagcactagatagaggtctggctgacgctgcttcaagatggcaaacacctttaacagctgcgaaaatcctttttccggaacgaaccttccatatgaaaagagaaatcttctatttatgcttctttggattttccccttctcttcctccatagatgcagggcttgggataacggttatttttttatgtgctgccttattaagagaccgcttcataaatgtgcttaatacgatcaatgcatcagcggattctataaggagccgttcggtcttgagcctgtatgggtgtggggcttctcggcacaccttcttcctttctctttcaagaccgtggattgtcgcagtaagcggaaggccaagccgttgtttcaaatactgggcagcaggggcagttgtgtcatcatgggcatgaatcagatcaaagcgtttattgtgtgataacacatggcgaaccattgtaaagttagcatcagctatgtaatcttcaaacttcgcatacgaaaacagctgcccgctcggagtaaaaaccgtaatgttgatatgagggtttaaataggaaatgaggcggtttaaatggacacctagcccgcttttcggctcatcgggatgttcgggtgaaagcatgagaatgttcaccgttctctctcccctctcccataacaggtgtatgcagaaaattgctcctcccacctggtgtgcgcttcctcaatctgaaagctgtttatatgacgaatcccattttcatcaagatagatgtcgtctgtatcggcaagcttgagagagacattcattgaattcacaatactgtattcagcccgatatacagcatcaccagccgtctgtctaatcgtccattcgcctttatcatacgttgtgcgttttgtcctgacagcttcaatgtcttttcttttgatgacaatccgcaattcttttatcatatcctgcgttttttcgaaaaggacagcttcagccagccgcattgtttcttctgagatttcccagcttacggtcaaggtgtgagcgttttgaatgattatgtcgaatgtgtccctaaaaaaggaaagcttatgtcgtatattatagggaaatgggtgtttatccatggactcttaacattctcctttccaatcgttcacttcgtgttcctattaaaccattacataaagaagaagcaaagaaagatttctcgacaaaatctcgtttttttcgcgaattcctttagaaactattggttttatggtataaaaaagaaggataaaaaaagaatagaaggtgatgaaacgtggaaattgctattattgcgttgtttatcgtcagtatagcgctaattgcattctcatattctcaaagagacccgatgaaagatgtagaacaggagctcgaaacactgcagctttctgcgatgcaggaaatttacaagctcaaaaagaaaatgacagtgcttgaggaagaattactggaaacaaaccttgtcattcgcaaatcaaagcagaacgacatcaatcaaaaaatcgctaaacaaatactttctaaatataataacggtatgtcagctgaagcgattgctaaagctgagcatgtatcagtggaagacgtgaatacgattatcaaagataatgagaaggtgctcgtatgacaaaacggggcattcaggcatttgctggcggcatcattttagcgacagccgttcttgcagctgttttttatctgactgacgaagatcaggccgctgctgtaaaagataataaaacagtaactgaacaagacgtgaacaattaccttgattctaaaaaaatggtttctgtgaaccgtgatgaatatcaaaaacttcttgattcaaaagagaaatcgttgaccgatgacagcagctcagacacgaaaacagacaaagtcaaaacgtacaagctcaaaattaaagatggcatgagcactgcggatgtatctgctattcttgaaaaagagggcattatctcttcggctcaagactttaatgactatgtcattgatgccggctatcacaaagaaattcgtgccggcgagtttaaagtaaaatcagacatgagtttcaaaaagatcgtaaaaacgttaacacgataaaaaaacaggctgactcagcctgttttttttcatccaaactttcctgaaatgtaatcgagagttctttggtccttcgggttagagaacattttattcgtattgtcgcattcaacaagctcgcccatgtagaaaaaggcggtttgatcagaaacccttgctgcctgctgcatgttatgcgtgacaatgacaattgtgtatttatttttcagctctagaatgagttcttcaatttttctcgttgagattggatctagtgcagatgtcggttcatccatcagcaaaatatcaggattggtcgcaagtgctctggcgatgcaaagacgctgctgctggccccctgacagcgaaagagcggacgtatgcaatcgatccttcacctcatcccataacgccacgtcttttaatgacttttccacaatttcctgaagcttcttcttatttttggtgccgtggactctcggtccgtaagccacattatcaaaaatagattgcggaaacggattccctttttggaataccattccgatattttttcgcaaatccacgatgtccactttatcctttaaaatgttgctgccattatagttcagctcacctgcaagctttacattcggcgtcatttgaatcattaaattcaatgtcttgataaaggtcgatttcccgcatccggatggcccgataatcgccgtaacctcattttcataaatgctcaaattgatattttttaaagcatgatgctgtccataccataagttcattccattgacttgatagacttcctgtttcattacagcttcggtagcaatactcattgccgccctcctatccgaatttcccgttaatataatcctctgtcttttgctttttcggactcgtgaaaatctgttcggtctgtccgtattctacaagctcgccgtttaaaaagaatgccgtccggtcagaaacccgcagagcctgctgcatattgtgcgtgacaataataattgagtattctcttttcaatcctgtaattaattcctctattttcgcatttgaaatcggatcaagcgctgaagctggttcatcaagcagaagaacagccggcttcatcgcaagcgttctcgcgatgcataaacgctgctgctggccgccggataacgagagtgcggatgaatgtaaacgatccttcacctcatcccagagggccgcttttgttaaactttcttccacaatttcatctaaaacagctttattccgctctccggcatatttcaatgcatgtgtgatattcgcatagatcgatttcggaaatggatttggtttttgaaaaaccattccgatttctcttctcaagctgacaacgttaatattgccgcccaatatatttaatccttcataaaggatttcaccttccgctcttgcagatggaattaaatcgttcattcggttaatatttctcaaaaaagtagattttccgcatcccgacggcccaattaaagcagtcaccgcatttttttcaatatccatgtttacatgatgaacggcttgtttatttccgtaaaaaatggacagatctttgacctcaagcacgtggttctgcttcggaacaataacagctcgctcaggtttttcttttaccatttgttcagacatgcttttcgcctctttccgttctaatttgccgtaagctttttgtagatcatcgtgccaagccatctcgccgcgagattaaacacaagaacagaaatcaccagcacggcagaaccaccgttggcaatcgcttcagcatccggaatcattccttgtgtattgacgttccaaatgtggaccgcaagtgtttcagcgggcctgaaaatattaagcggtgatgtttccgaaaacgggttccactccgtaaaattaagacgcggtgttgtcaggcctgccgtaaataataatgcggccgcttccccgaacacccttcctgacgctaaaattgctcctgtgataatagaaggaatcgcacttggaattaaaaccgtttttacggtatgccagcgtgatacacctaaagcgagagaggcttccttcagatctttagggactgaacgtatcgcgtcttctgtcacacgcaccatgacaggaaggttaaaaacagttaacgcaagcgctccgcctatgatcgtatatccccagcctgttaagttgacaaacatcaataatccaaacattccaatgacaatagacggaagagatgaaagcacctctatacatgttctgatgaagtcagttactttgttattaggcgcgtattcagccatgaagaccccgccgcccacaccgagcgggattgtaatcagcattgtaataaacaaaatataaaaggagttaaacagctgatctcgtatgcctcctccagctgcaatggcgctcgactttgttgtaataaattgaaaactgagctgagaaacaccgtttataataatataggaaaacaaacctactaaaatggcagcgataatggctgcacacaaaccaaacattccggtcgccagtttatctgttattttgcggttcattacactttcctcctagatgacaagtagcgaataagcaggatgaacaagaatgacatcaccagaagcacaagccccattgaccacagcgtattgttttcaacacttccgtatgtggtgtggcccatattcagcgtgatgatcgttgtcagcgttcccgcagtgtcaaacaggctttccggcaatactcttgtatttccaatgaccatctgaacagccaaagcttcaccgaacgcccgagccatgcctaacacaacagctgtcatcaatgttggaaaagctgcaggcacaagtacttttctgatcgtctgccatcttgtggccccaagcgcgtaagaaccctctcgtaaactcttcggaagagaagccattgcatcagcagaaatcgatgtgatcgtcggcagaatcatgacggaaaggacaatcgttcccgccaataaactgtgccctgttccgctcgatttgaactgggcgataaacggcaccaatactgtaagacctatgaatccataaacaacagatggaataccgactaaaagctcaatcaccggctgcagcactttctttccccaattcggggcaatctctgtcatgaaaatcgcacctgcaatgccaagcggcgcagcgattagagcagaaagaatcgttactgcaaatgagccaaaaataaatggcagcactccgtatttcggatcagtatctgtaggattccaatttaagctcgttaagaattcaattgggcttacaccatttacaagaaaagattgcagccccttcacgccgaggaaaatggtgatcgcaacagatgccgcaatcataatcagggcacatgctgtcacaatcattcttccccgaacttcatccaattgccgattttgccttgagctgattaaacgctcgctcacagacatattttctctattgtttatcattgttttacactcctatgaatgtgttaagaggagaaacggttgtccccgcactcctctttttattaagatcagctttgcttccctttggcatcgcgtgtcactttcatatcagtaaccggaatgtagccttggtcagtaacaatgcttttttgaatgtcttcactctttagataatcaagaaattctttagctaaacctgtcgcttcaccttttgtataagaatgctgataagcccagatcggatactcgccagttgctacatttttcgcttcaggtttaacaccgtcaatagatagagcagttactttgtcatctgttaaatatgagaatgcaagatatccaatcgctcccggagtatcagcaatgatctttttcaccgtgttggaggaatcttcagtaatgccttctgcaggctccgctccgtcaagcgcatatttcacaaatgtagcacgtgtgccggaagaatcagggcggtttacaagtgtaatcttttggtctttgccgccgagctctttccagtttttgattttgccagtgaagatttttttcaattcatcttttgaaatatccttcacaccagcatcagggtttacagctgctgccataccaactacagcgacttgatgatcgacaagcgcttttgcatcgataccttctttttcttcagcaaaaacgtctgaattcccgatctgaacagctccttcagagacttgagaaagccctgttccagaaccgccagcttgtacctgtatatcagcatcagggttttcttccataaatttttccgcggctgcaagtactagtggctgcattgccgatgaaccagaaatggttaaagaacctgatgccttttcttctccttttgcagaatcgctattcgattttttactttctcctgcatttccgcatgcagctgcaatcatcataaaagcagccatcagaagcataagcaccaatttgttttttttcatttcctgaattccccctgcgtataatgtgtaatttgtcctacacgtatagagtaaaggttctatgtaaaaagggtttgaaccgaatgttaaggttttgtaaatcagtgcgtttttttgtataaaaaaaacgcccacatcatgtgagcgtttctttttagttatcagaagacgttgtgttttctgcattttcttcgattttgtttttattcttttgctgagtatcttctttgtcctgcttcgatttcagctcaaaatatttatccattacttccctgccgatttcgtttgtaatggtatatttagcgctgtaatcaatataagcccaagggactactacagagatcgcaatctcaggattatcagccggtgcataggcaacaagtgtcgtattataagtcgatgttcctgtttttgatttatcaggtccatcatagaacgattgtgctgttcctgttttaccggcaggctgatatgacgctgaagcaaattgactggcagctgtcccttttgtcatcacccgtctgaatccggcctgaacctctttaatatattcactcttcatgtcgattttattcagcacttccggctgaacggattgtacgacagcaccgatccctcttttagcatcaggttctctgacttcctttacaagctgaggctttaagcgatatccgccgtttgcaatcgttgatacgtattgcgcgagttccagcggtgtatacgtgtcgtattggccgatcgcatagtcaagcaagaatcccgtcaatctgtctgttcctttatagcctgtcatttcattcggaagatcaattccagttttgacacccagtccaaattggctgaagtaattacggaacgtatcaaaggccgtcgtatcaatcggtaaagcctggtgcggtttatattcaccttttccgagcgcgatcgcagttttaaacataaatacgttggaagactgctctaaggctctttgaatattgaccggtcctaagttagtccatgactttttaccgcgtttatcctgactgccgatatacaatggttcatcctgaaaaactgtattcagattgatagctccggtttgaaggcctgtcaagactgttgcgcctttgactgctgaacccatagcgtaagatgacgtcattgtacctaaagcgtaatcatcaattttatatttcccattttcttgtttaatctgcttgcccgccattgaaagcacttcaccgtttcttgggtccatcatgacaacgaatgcccggtctaacaattgcgtgcttggtcttgctttagcagatttgaggttcttctcaatgattttttccacttctttttgcaaatcaatgtcaatcgtaagcacgagatccttaccggctttgccttcagataccgtttttgttcccgtgacattgccgtttgaatctgtgatattttcgactttggctttttgtccctgcagaaggctttcatattggtattccaaatagctttttccgaccctgtcattacggctgtagccaagcgacagataatggtcgagcaagttggacggcaatccttcattagagctggaaacacttccgagcactgagcgaagaaggtttttatacggatattcacgttcccaatcggacgtgacatcaacacctggcagttcgtctaaatgttcacttaccactgccatttccttcgctgatacatcttcgtttttgatatattgaggggtcaatgcatagcccgaatccatctgtcttttgatagcgaggatctgcatatctttatccgtcaattcattcaactgcttatcagtaatccgttttagctgaagctggtataaatcgtcatcggatatttttttgtcttcaacctgctgtctttctttagagctaatgagctttttcgcttctttcggtctagtcaaaatccaataatcttttttatcccgttctgttactttttttgtatcgactttgatcatgtcagacagcttttttgcgatctttaagcgctgttcttgcgtggtcgatttagatctcgtgtatgtgattgcatttaaagccttatttgtcacaatggcattaaagtttcgatcataaattttcccgcgcggtaccgctgagctgacttcactttgttcttgcttattcgcttggtttttgtaatcatcaccttgcacgatctgcttgatgcccagttccacaataatccaggtaaatataacaaaggcagctaaaaataaaatattcagccggatcggaagcgacttctttttctctttatgattttgcttttttggtttatttctcctcataacatcaccttttctatttacagaaagaaaagacactcaagtaagagtgccagttttcattttaaaggttttttcgacttttttctacagataacccctttttggcaaaaaaattatctctcgccttttaacagggtcggttctgttacccgtttttggccgtcttcttccatggtttcattttccccttctttctccttaaaacggatatccttgacaaagtaataaatcaaaggatgtcctatacccaatatcgcaagtgacaaaggaattcccacatcctctttcagaagggccacaatcaggagaaagcacaaaatggaaacaattctgccggcgttcaagaacatttctctaagcacgatatattcaattcttgcttttctggcatgcctcgcgcgccctatcacatcatatgtaagtgatacatatggcacaagcaacagaggatagccgatggcaataaaaacgccatacgttaataatgtcgaaaagctcatatggaacagaatcaaaaacagcgcgccatacaaaataagtccgcccagcaaaatcgatttttttctcgcctttttcttaatcagcctggatgcaaagtagtaggcaaagaaggaaacagctgaattgacaagaccgaatgtaccgagagcaagttcgctgtttgtctcaataaatacaaacacactgattaaaaagacaaaaatcccttctctcaaaccctgaaaaaaatgcgcattcgtgattctccgccaattcatattgctatggcgctctccaaatactttgctcagcataaaacggccctttgattctctccgttttaagaaaaagctcatcacgacagccagggcaaataaactgagggagagactgaaaatcactgtataacccgtattattttcaagccttgagatcacgaatccggctacaatcgggccgatcattcctgcagaggaagacagaatgcccataaacccgttgaaaaagtctcgtgtatccggctctgttatttcaaaggtcagtacgttaaacgctagccaataaaagccatagccaactccgagcaccgcgccgattagcacgaggcggctggccgccgtttctccggctaaaagcacacttaaataaaaggcagctaaaaaaatgacgccgaaccttaaaatgaataccctgtctatttttttggctaaccgtccagccaaataaaaggttatcggctgcattgtcacaatggataaattatatatcgccaaatcaataaatttccctgactgcttccaaagatacacattaacaaatgtattggacagtgcaattcccagcgagtaaagcccgccaatggtcagcagaaagagtaaccctttgtttacgtctacatcgcctatcactttttttagtttgctcattactgactcccctttactatcccttagtctgtctcactcaaaccgagatatgtaaaaagaagacataaaaaaacaaggtcccataatgaggaccttgtttgtgccattattttgcttcgctgtatagacgagccacttcgtcccagtttacaacattccagaaagctgaaatgtaatcaggacggcggttttgatagttaaggtagtaagcatgctcccaaacgtcaagacctaagataggcgttttgccttctgaaagcggagaatcttggtttggcgtgcttgtgatttcaagtttaccgttgttcacaacaagccatgcccagccagaaccgaagcgtccagctgctgctgctgcgaattgctctttgaatttgtcaaagcttccaaatacactgttaatctcttcagcaagcgcgccagtcggttcgcctccgccgtttggagataaaagtgtccagaataatttgtggttcgcgtgtccgccgccgttgttgcggactgcagtgcggatgttttcaggaacagaatcaagatctgcaacaagctcttcaactgatttgttggcaagagcagtgtttccttcaaccgctttgtttaaatttgtcacgtatgtgttgtggtgtttcgtatggtgaatagtcatagtttccttgtcgatatgcggttctaaagcatcgtacgcataaggtaattctggaagttcgtaagccatgataattcctccttagtatatatgtactgaaatgccgcttcacagcgagcctttcttcattcaatgtaacaaaagaatgctttgtaatcaatgaaaaagctcacgatttggctcatttcagcggacatatttcactttaaccgataatctgccccattaaacctgccgccagcatttcttataggaccgtccataaaaagtatccgatcatcaaaagctgtatgatgccctttgcaataacccctgttaaaaaaccaatgagtgagccgaggccaattttaaacgctgactttaagtccttctgatgaacgataagttctgcgcaaacagccccgataaacggccccaatatgatccctgcaaccggaatgacaaaaggcccgattaataaaccgatcgtgcttccccatatggcagctttgcttcctccgaacctttttactccaagcagattcgacacgtaatctgctgcgaataatactgcggcaaaaactgcctcaacaagccagaacatataagaatacggactgaatgaaaataaaaatccgtacaatacaaatccggcaacaataaatactacgctcggaataacaggatacaccagcccgataaaggcaatgataaaaaccgctgcaatcaacagccaatacaacatatccatagcttccatcctcccattttactctgtcttcttcatgtcttccttgtattcacacgcatgcaacgatacaataagcaacatatattagtttagctaggaagtgaagatagtgaatgtgtttcagcttttcattaaaagtacatactctccccgtgatattgcaaaaacaagatttcaaggaatcggaaaagcgattctttatgtatttttgctctctgtcctgtttgcaatccctaccgcttattatgtaagtacagggaccgtaaaatcaatgaacggctttaaaactgttttaaacaaagatttccctgatttcacaatttcaaacggcaaacttcaaacggatgagaaaaaagccacggaatctcaagcaaatggtttcgttatcgtgttcgatccgacagactcctatggcactgaacaaattgaagcaaagcaaaacgcgatcggcatccttcagaacaaatttgttttggccattgacggacaagcccaagaaatgtcttactcaatgatgccatcagagttacagaaaaaagatgtcattgcagggttaaaccaaaataaagcgatgattgtaactgttctctcagctcttatttttctcgtaacagcagcgggaaaatttattgaagtatcgtttttagcgcttatcgggttaatcattaagaattcgcagaaaaaacatttatcctatcatcagctctggaagctttctgcttattccatcaccctttcaactgtattctttacaatcatgcgggcattagaagcaaccgtaccaagtgaatttttgctgaactggtttgtcaattttgtcatcctgtttctcgttttaaaagagattccgtccaaaaaagctgctgtataaaccgaggctgcattcgcagtctcttttcttttgtcatgaatcgaaatggacaagcatactatggtataaaatttcgtatgcgggaggaaaagcgatgaagcgtctcaccttagtatgcagcattgtttttatactttttattcttttttatgaccttaaaattggaaccatacccattcaggacctccctgtctatgaagcatcagcaaaaacggctgtacaagaaccggcttataaaacggtgaaggtaaagccgggtgatacggttatgtcgatagtcggatcagcaggttctccggatgacattgtaaaggattttgaagcactgaatccaaaagtgaaagctaacgccattcaagcgggaacagcgtataaattcccggtctatccttaatttaacgttaatttcttgtcagttcggcgaagacactgttacaatgtaatttgtaaaataaattcacataaaccatactagaattgttatatctagaagcggcaactacaattaaggagcgattgcaagtgagtgaaatcacacatcgtacaaaaacgcgtcccgtcaaagtgggacctttaacaataggcggcaacaatgaagttgtcatccaaagcatgacaacaacgaaaacacatgatgtagaagcaacggttgcggaaattaaccgtttggctgaagccggatgccaaatcgttcgggtagcatgtccggatgaacgggcagcaaacgccattgcggatattaaaaagcgcatttccattcctctcgttgttgacatacatttcgattataaacttgcgttgaaagccattgaaggcggcgcagataaaatccgaatcaaccccggcaacatcggccggcgcgaaaaagttgaagcggttgttaaagctgccaaagacaaaggcattccgatcagaatcggagtaaacgccggttcattggaaaaacgcattttagaaaaatacggttatccgactgccgatggaatggtagaaagcgcacttcatcacattaaaattcttgaggatcttgattttcacgatattattgtcagcatgaaggcctctgacgtgaaccttgcaatcgaggcttatgaaaaagcggcgaaagcgtttgactacccgcttcacctcgggatcaccgagtcaggaacgctgtttgccggcacagtaaagagcgcagcaggactcggcgccattttaagcaaaggcattgggaacaccatgcgcatttcactaagcgcagatcctgtagaagaggtaaaagtagcaagggagcttctgaaatctttcggcttagcctccaatgctgccacgctcatctcatgtccgacttgcggccgtattgagattgatctaatcagcattgccaatgaagtggaagagtatatttctaagataaaagcgccgattaaagttgctgttctcggctgcgctgtaaacggacctggtgaagcgagagaagctgatatcggaatcgccggcgcacgcggtgaaggactgctgttccggaaagggaaaattgtccgtaaggttccagaggaaacgatggtagaagaactcaaaaaagaaattgacattcttgctgaggaacactacgcaaaacttgaagctgaaaaagcaaaattaaaagaagaaacacaaaaagcttgacgggaacccgtcaagcttttttgtgttagaaaaatggaataataaatattccaagcactaatgaaacgacaccgatacccattgcccaggctccaaggccttgagcacctcttcttcttgcgatatagccgacaataataccggcagctcccaataaaacaggcagtacaaacaatgaaataatggacaaggctaaagcgatatatcctattccccgtccttcattgacattgccgccgctgcgatcattgtcttggtcattgctgcggtcagcagcacgataaggctctgcgatttcagcagctgtttcctcaaaaaaaccgtcattgtcgcgggtaatatttgtcccttcagatccatgatcaacatagtaactgttgttatcacgcttttcgtaatcgtttgccaccttcaattcccccttctgttttattaaaggagcttttatagtttgatccattttgcctgattcatgtttgctaaacttttctgttaatgtcaattgtttatgttacacttgaagggatgaaactgaaggagtgtgggcatgttacgcttaggaatagatattgacggcacaatcacggctcaggatacattcgtcccttatttgaaccgttcgtttaatctttccatttcattaaacgatatgacggattatgatttaacaaagctgttaaacattacccaggaagaattttgggattggatgaatcaaaatgaagcgatcatatataaggaagcattgcttgcacagcatgcgaaacagtcacttgattttctcaaagaggagcacaagcttatttatattacagcgagacggactcatttaactgatattacctatgaatggtttgacagacaaaacattcattatgaccacatcgaactcgttggcggtcatcacaaagttgaagcggtcaagaatcataacatcgacctgttttttgaggatcatcacgggaacgccatgatgattgcgaaagaagccgggataccggtgattttgttcaattccccttataatcagcttccgattgattcaaacatcatcagagtaaacaactggctagaagccgttcaatggatgaacaacaataagcatcacttaatacgtgtcaataactgaaaaaggagcccaaaccgggcccctttttcatatatacgcattttacgcagtagtgttttcttggttttccgctgtacaatcagggcatgtgccataaatctcaaatttatgcccgctgacctgatagccatccaaatcatcacaaagcttgtccatcggacatgattcaatttcctttgttttgccgcaggcaagacaaataaaatgatggtggtgatgggtgaatgaacacttaaatcggaagagcttttcaccggacagctcagttgtttccaaaatcccaagttcttcatataaagaaagatttctgtagattgtatcaaagcttaagcctggataatcatcattcagtgcagacagtacgtttttagcggtaagatatctgtctgaatcagcaaaaagctgcagcatatcctcccgtttgtttgtatatttatatccgttttcttttaataggttcagcgcttcttggacgttcatgaagggtcccccttttcgctttgcttaagaacgtatcacatgtatgaaaaagaaaatggcagctgtctgtccagcaagccattttctttactgcagataaaattatacccataaaatgaataaaagtaaatgaaagcctagtggattgcgtttttgaattttccgcctctcgtttcatgagtattcataattgttatgaatgcattttgatcaacttcaaacacgatcgatttgagctttgtcacttccagccttgtgacaaccgcgtaaattacgtctttttcttcgtccgtatatccgcctttccccttcagcttcgttgtgccccgaccgagacggtgcaaaatcgcgtcggaaatctcatcatactgctcagacacaataatgacagcttttgtttcatcaagcccttggatcacggcatcaatcgttttcatcgcaatataataagtcatgaatgagtacatcgcttgctcaggaccgaacacaaaaactgcccaaatgaaaatgaacacattgatgaacataacgaactcacctactgaaaacgggagttttttggtcagcaaaataccgagaatttctgtaccatccattgaacctccgtttcgaataacaagcccgacgccaaagccgagtaaaagacctccgaacacagtagccaaaataggctgggttgtaatggcttctacatggtgaagtgaggattcaataacggcaagcccgacaatccctataaacgtagagactagaaaggtcttaccgatatatttatatccgaagatcataaaaggaatatttaatatgacaacgaaaaaagcgaaattgagaaaggggtttgacataaagaggtggtctaaaataagtgatacaccgataatcccgccatcaataaaatcattggggattaaaaataattcaatacttacagccgcagatgcagctcctaccagaatcataaagaccctgaaaataaaatgggtaaatgtttctttcttatgttgttttgttggggtcataaaatctcctttcctgcaataactattttaaatacattataaatctattttaccattaaacactgacacattttactgatttgcccatacattaagtctggaggtggaatgaccaatgattttatttcaaagaattattttacagcggcttaatcaggctactgctgatgatttgctgaagtactcaaaacaatacggaatcagcttaacaagatcgcaggccgttgaagtagcgaacttgttatacgggaaaaatgtaaacatctttaatgagagtgaacgaatgcggctgttgaaacaagtagagacgattacatcgaaagaaacagctcaaacagttaatgaactattcaaacaatttacaagctaaaaaatgggggtgttatcccccattttttattgctgtaaaatcttttcgagcaatgtatcatcaaattgtttttctttcagcatgtcaatctcaaaacggtatggcggttttttgttctttttatcttcaccgacatatggtgtttcaagaatttttggaatgtcttttaactgctcatggtgaacaacatattgcagtgcgtcaaaacctatttcaccaaagccaatattttcatggcggtcttttctcgcacctttgacatttttgctgtcattgatatgaagcactttaatacggtcaatgccaatgactttatcgaactcattcagcactccgtcaaagtcttcgacaatgttatacccggcatcatgtgtatggcacgtgtcaaagcacactgacagctgctcattgtgtgtaacgccttcgataatctgtgcaagctcctcaaagcttctgccgcattctgatccttttccagccattgtttctaatgcaatctggacattttgattcggatcaatcacttcatttaagccttcaataatttttttgatgccggcttcagctcctgcccctacgtgagcgccaggatgaaggacaatttgcttcgctccgatggccgctgtccgttcaatttctgaacgaagaaaatcaacacccagctcaaaagtggacggatttgtcgtgttgccaatattaataatataaggcgcgtgtacgataatctcgtcaatgccgttttcttgcatatgtgcccggcctgcttctatatttaagtcttcaattttctttcggcgtgtattttgcggtgcgcctgtataaatcataaacgtattcgccccataagagactgcttcctggcttgctgccagaagcatatgttttccgctcatagagacgtgtgagcctattctcagcaacaggttcccctactttcttttcttagattggtttcttctctgttttttcttgattttctccatctcatagctcattttctttttatacccaggcttaaccttcttcggctttttcacgagacgatgagcaatttcatccgcttcattcggcgtttttttacgctttttgcggcgctgacggtcatcgccttttttccattcgcccttttcaagctctaagtaatcaaattcgatgcccattttttcaagtcttactaatgcatcctcatcagtaagctcataaatggtcatcgcttgtcctgatgagccggcacgagccgttctgcccacacggtgaacatagaaatcgagatcatccggcagctcatagttgataacatggctgacacctttaatatcaatacctcttgcggcaaggtcagttgcaatgatatatgtgaattccaaatcattgatctgcttcatgacttttttccgctcacgtggtgttaatccgccgtgcagcaagccgattttcatgcctttgccagtcagatactgggcaatatggtcagccgtatttttcgtgttggcaaacacaatccccaggtatggattcagatgcgacatgatgtcaaaaaggagcttgtccttgtcacgatgtttcgaaggaatgaggatatgctcgattttcgcagcagtcacctgttttggctccacatgggcgtatttcggattttccatgtatttcttcaagaatggtttcagcttttccggtatggtcgctgagaacacaagcatttgcagatcctcaggcatgcgggaaccgatgtaatctacatctgcaagaaatcccatgtccagcattaaatccgcttcatcaataacaagagattccgctttatgaacacttaacgcctgttctttgattaagtcagcaatccgtccgggtgtaccgacaacaagatgcggctgtattttcaatttatcaattgatttttgtttatcagtgcctccgataaaacatttcgagcgaatctgactgccttcctcaccctgcgtgattttaagcgcttcctgataaatctggttggctagctctcttgtcggagccgtaatgactacctgaacgacatccttagcaggatcgattttgtttaataaaggcagtaaataagcgtgagtctttccagtacccgtctgagactggccgatgacgctttctttttttaacactgcaggaatcagccttttctggatatcagtcggttcgtaaaaaccaaggcgatgtactgcatctataataaatggtttcaattcataaagttcaaatttcgtttctttcatttttcccagctccttaaagcggcacattatgtgtccatcatcacattatacccgattttgcttaaaaacaccacgtttgcaaggcgtttgttttattcagttatgtaaagcaaataccgcagcccatgcatattctaatagcagagagagctgaaaggaggtacaagtatgttttcaccgcagcagccaatgagaaattacccacagcccggaccgccccgccccatgccaaatcagcgaatgatgggcagaagaccgcctaatatgcgaggactttcatttggagcacagcagcaaggttttcagcaagccggacaatttcttcctcaggcaaatgccggagcgagaaatggtgcaggtgcaggcggaggcttaaaaggaatgctgtcaaggttcctacccggcggaggaggcgctggcagtgccggagttccaggagttccaggagcaggtgccgcagcgagcggaggtgctggcctgcaaggcattcaaaatatcgccaatcctgcatcattatccagtatgcttggaaatgtgcaaaaagtactcggcatggcgcagcaagtcacccctatgatccagcagtacggcccattagtccgcaatctgccagcaatgatgaagctgtacagccaattaagtaaaagtgatgatactgagacagaggccaatgaggaaagtgaaaaacaatccgtttcagaagaatcatcagaaaaagaaaaagagactgaaacaaaaacctcagatgggaacaaaaaatcaaaaccaaaaagttcttctctcccaaaaaaatctaaaacaactgacaataaagaacaagaatcaaaaacatctgcctcgaagaaaaaggaagctgcctctcctgctccgaaaagaacatcaggcagttcaaaaccgagattatatatttaacattctttgatatctgaagtgagattggctataatgagatcagaagaatgcaagaatagagccgtttgattacggctttttatattgcctttactcacttcagtattggaggacaaccgaaaatggacgtaattaaaatttcaccgcgcggctattgctatggtgttgttgatgctatggtcattgccaaaaatgcgtcactagataaaagcttgccaagacccatctatatactcgggatgattgttcataataaacacgtcactgatgcgtttgaagaggaagggatttttacattggacggctctaaccgtctggacatcttaaagcaggttgacaaaggaactgtcattttcactgcgcacggtgtttctcccgaagtcagaagaatcgcagaagaaaaagggttagtcgcaattgatgctacatgtccggatgtgacgaaaactcataatctaatcttagagatgaaagaaaaaggatatcacgtaatctatatcggcaaaaaagggcatccagagcctgagggagccgttggcgtagcgccggagatcgttcacttagttgaaacagaagaagatgtaaagaaccttgatatccaagcagagaagttaatcgtgacgaatcaaacaacaatgtctcaatgggatgtccacgacattatggagcttgtcaaagaaaaatatcctcatgtcgaatatcaccaagagatttgcctcgctactcaagtgcggcaggaagctgtatcagagcaggcaaaaaaagcggacttaacaatcgttgtcggagacccgaaaagcaacaattcaaataggcttgctcaagtgtcagaggaaatagccgggacaaaagcataccggatcggcgacttaagcgaattgaagctcgaatggctgaaaggcgttaataccgttgcagttacagcgggagcttccacaccgacgccgatcacaaaagaagtcattcgctttttagaacagtttgatcacgaagatccatcaacttggacaactgaacataatataccgctcaaaaaaatacttccaaaagtaaaagcaaaaaactgaggctgtaaaagcctcagtttttttatagaaatgtaaatggatttgtatctgtttcagaaacaaagatattcacgtcaaactttttatcattacacattgatgtcagctttctcgtgacgccttctttcatgattttttccgcatagtgtcccggatcaaccacatttaggccaagcatcatggcatcatgggccacatggaagtataaatcccctgtgacgtaaacatcggctccctttcgttttgcatgatgaatatacttgtttccatctcccccaagaacagctacctttttcaccatgctgtcagcatcccccaccattctgacaccattgacgtcaagcttgtctttcacaaataaagcgaattccttgagcgtcatctcatttttaagggttccgacacggccgagtcctttttcggcaggagtctgttcaacaggatagatatcgtaagcaacttcttcatatggatggctttttatcattgcattgataacagctttttcgacgcttttaggaaatacagtctcaagccttacttcatgaacaagctcaagctctcccacttcaccgataaaaggcttagctccgtctaatggtttaaaactgccgattccttcagatgaaaacgcgcaatggctgtattcaccgatatggccagcccccgcatttccgagcgcggctctgacctgctcttcatattccttcggcacgtatactgccagctttttcagaggatccgtataagtaggcaccagcacttccgtctcactcagctctaatgcttcagcaagcaaatcattcacaccgccgtccgcaacgtctaaatttgtatgagctgcataaacagcaatatcatgcttcaaacacttttcaattaaccttccggcaggctgatctgttgaaatatgctttagcggccggaaaattggtggatggtgtgcaataatcaagtcaacctctttttcaatcgcttcatcgataacgctctctaacacatcaagtgtaaccatcacatttttaattggtttgtttaaggtgccgatttgcaggccgattttatctccttcaaccgcataggctttcggggaaaattgttcaaacagctggatgatctgctgcccatttacacttttagccatgatcgattacctcctttaacagctccattcgatcggcgagctcctttaatttttgtttgttttgctctgtatccgccgcttggctgatctgttcataaatgctttgagtgtgctgaagctcttgtgtccactttttcaaaaagacagcatttttttcttttgccaagaaagggccaacgagcatcccggctgataaagaaataccgtcataagccgcatccctgtctcccgcttctgccaccagcacctcatagcactttccgtcctcttcaaggattacctcatctatcagcgcatatctttctttataaagccactccctgatatgaacagcatgaatattcggctgtaaaatgagccgttccttccccgttaatttgtctttgcccgcttctaaaatatgagcgatcaaagatccgcccattccggcaatcgtaatggcatcagcttcaccttttttaatcacttccagtccgtctccctgccttacagaaatgtgcgagtttaagcctgatttttcaacctgccgctttgcagacaaaaatgggccgtctgttatttctccggcaatcgccccgctggctttatgattcagcaccgcaaaacaaggaaggtaggcgtggtcagagccgatatcggccatcaccgctccattcggtatgtactccgctactgtttgcaatcgtttagataattttaattcgttcacttgtcatcacaacttttctcaatcattttttcctttactatcatataaaaaatcagcccggaatccaagctgaagcaaatgattttgaaattatttcttttgatgggggtctgcacgcggcagtcaaaaataaaaggctgtcgagaacatctcggcggcctgtgaatgtataaagagaaaaatggttcttttatttaatttttgacacccactctgccatatcatccagcttatcggccggtacaagaccggaaggcattccattaccgcctttttcgatctttgttttaatttcagcgacatctttcttatcccctacaccttttaagctaggacccgaaacaccttcataattttcaccgtggcatgcgatgcagtttgccttgtaaatttcttctggtgaagcgtttgcatctttcttttcagcagatttgctttctcctccgcttgcaatctcccgagagtcatcaagtccttttactgataaaaagaaagttagaccaattcctaaaacagcgatcagcaaaaatggaataagcgggttccatttcatttcccttccccctttttgatccttccccctatgtaaacacttctaattctaacttatttttacaaaaagtaaatggattgctatacaaaagttttttattcacactttatacaaaattgaattgaaacatgcctaaatctctaatatcctttttattctattgtataatgtattgtatacgcttacaatagaaaatatggaattagattttgaaatttttcaccacaatgttcatttgcaaatgacatcatttttcagtaaaataaaggcatattatccatatatctttttaaaaaaaagaagaacggatcttcaagacccgttccatcttattcaaggaaatctttcaaacgtttacttctgctaggatgtcttagtttccgcaacgctttggcttcgatttgtcgaatacgctctctcgttactccaaatactttgccgacctcttctaatgttcttgtacggccgtcatcaagaccgaatcgaagacgcaatacattttcttcacgatcagttaacgtatcaagcacatcttccagctgctctttcaatagctcgtatgcggcgtggtcagaaggtgaagttgcttcttggtcttcaatgaaatcaccaaggtgcgagtcatcctcttcaccgatcggtgtttccagagataccggctcttgagcaatctttaagatttcgcgtactttttcaggcgttaaatccatatcttccgcaatttcttcaggtgttggttctctgcctaagtcttgcagtaattgacgctgcacacggattaatttattaatggtttcaaccatatgaacgggaatccggatcgttctcgcctgatcggcaatggcgcgtgtaatcgcctgtctgatccaccacgtagcatacgtactgaatttataacctttgcgataatcaaatttttcaacggctttcatcaggcccatgtttccttcctggatcagatcaaggaacagcataccgcgtccgacataccgttttgcgatactgacaacaagccgcaggttcgcttcagccaatctgcgtttagattcttcgtcaccttcttcaatcttttgagcgtaggcgatttcttcttttgcagaaagaaggttaacccgaccgatttcctttaaatacatacgaactgggtcattgattttaacgccaggcggtacacttaggtcattaaggtcaaattcttcttcggctttggcaagctgctgaatattaggatcttctgtttcttcattctcactaattaattcaacaccttgttcacctaaaaattcataatactcatccatttggtctgattcaatttcaaagctggacatacgctcagcaatttcttcatatgtcaaaacgccacgttttttaccagactctgttaattgctcttttacttggtcgaatgttaattctgtctcgtgggtttgtttatcagccattatggatccctccttccaaagcttgcaacgaattctataagcggtatgattcttattcggtccattcaggcgttttctatgtgaactgcctttaacaatgtgcgaataatgaaatgacaattcatgatgaggttaagcgatctatttgctcctccgcaaggaatcattgccaataaatgctcctcatcagttctccagttattttaaagatcggttcaatgtaacgatttcttgagccagagaagcagctcttaaaaaatctttttgcctttcggcttcggctctttccgcctctttttcttttatcattgaccaatttctttgattcaacactttttttacataatctgataactcggcttcgctaagctcttgattaacctgaagcattaatatatcggacaagagctggcttatatgatcatccgtcaccctggccatcagatgctgaggcgtcagctcggctccctcttcataaaaagcataaagataagcggctaatgcccggtgctcatcaatattaaattgaaaccctacccggtcaatcacttttttgatgacgctccgatctcgaagcatgtgagcgagtaacagcctttctgcattttcatacgccggacgcaaacgtttttgccttgcttttgtcgtcagatgcgctcgccgcgtttttgtttcaccgctattgtcagcaggtttgttttgcttgctgaaaacagacagctgctcagttaaagactcctgtgaaagcgaaaactctgaagcaagctgctttacatagacttcctgctctagagaccctgaaagcgtgctgatttctttcagtacgtctttaatgtaagctaggcggtcgccttcatcggacaggttctttccttttcggaaatattgcattttgaacgccattacggtgacacttgcgtcaataatgtcgtttttaaatttttccccgccgaattttttgatgtaatcatcagggtccaatccgtcaggaatcattgcaactctgactttgcagccttttttttgcagaagctccgaagcttttaaggtggcttcataaccggctttatcagagtcatagcaaagaatgatttcttcgacgtttcttctcaggatcttgacatgatcatctgtaagagacgttcccatcgtggctatgctttcctttacacccgagcttacggccgatatgacatcagcaaacccttcaaataagactgctctttcctgctttctgatatgaaggcgggccttataaaaattgtaaagcagtttgcttttatgaaagagcggggtttcaggactgttcatatacttaggctgctggctgccaagagccctgcctgagaaagcaacaacagccccgtgatgatcatggatcggaaacatgacacggtttctgaagcggtcgaaatatccgcttccgtcttcgcgtctgatcaggagacccgctttttccatttgcgcctcactaaatcccctctttacaaggaatttcgtgataaagtcccaagaatcaagagcatagccaatctgaaattcattaatcagctctttcgtaaagcccctagaaagcagataatccagtgcctcttgaccttcttttgtatttattaacaaatgatggtaaaatttcttcaggagctcatgtgcctcagccattttttgttctccagaagactctggccgggctccggaatggactgttatatcatctggaaaatcaatttggtatttgtcagcaaggtgagaaaccgactcggcaaaagaatagccttccatctgccttaaaaaagagaaaacattgccgcccgctccgcagccaaagcaatgaaaaatctgtttgtcgggcgatacggaaaacgaaggtgtgctttctccatgaaaaggacagagtccaaagtagtttcggccttgcttctttaattgaacataatcacctatgacttcaacgatatctgccgacttttgcacctgatccacaatttcatctggtatccgatttcccatcttataacactccgtcgtacattattcgatgctttagtgcaaaatcccttcatcgttcgacaggattttttgcagcagtgtaataaatcgttctcgatcttctttattcaattttttaggccctttggcatatacgccttttcttctttgtttgccggaaaaatgacggccctctagggcaaaatcaatcgtgtcttccttgtaaagacgacctctttccgacataacagagacatttctgttcaacagcagagatgctaatccgatgtcctgcgtcacaacaatatctcccggtttcacgtgatttgcgatatataaatcagcagcttctttatgaggatcaacatacttccatttttcttcattgcttctggaaagctgataatgttcaaatgaagcgacaaaaagaacttgaacttcatactcggatgctgtttgtaaaatttcatcttttaccggacaagcatcagcatcgacaaaaatcgtcttttcttgttcattaagaagagtaattctccatccctccattaaactcctgcataaaagcaagcaaaatcgcacatcctttattattgtggatgtatatgaatttgtcgaaaaatttccgggagaaattcttgacatcttacccataatagtttattcgtatcacacgatccttaaacctaaaattaatcattttatcacaattttttattataatacaaacttcacaaagatgctattgtttttcattattcccttttggcacagccaaaaacccaggatagagcgtcctgagttatatgttttttgttttgagatgatggataatatttgctgtttcctcaaccgctttatttgaaacatcaacaacctggcagccgatccgatccacaatcttttcgaaatactcgagttcctctttgattctgttgatatttgcataaatcgctttatcattaagcccgagtgattttaaacgttcttttctgatatgattcagtttatcagggctaatctttaaaccgatgcattttttcggatcaacgttaaagagttcttccggcggatcaacctccggtacaatcggaacattggcaaccttcaggcgtttgtgtgcgagatattgagacagcggtgttttagacgttcttgacacgccgatcaaaacgatatcagcttttaaaatccctcttggatcacgtccatcatcgtatttaactgcaaactcgatggcctccacttttttgaaataatcttcatcaagctggcgcacccgccccggttcgtatttcgctgttaaaccgtaggctgtttccattttatcaatcaacgggccgataatatcataatataaaacatttgctttttccgcttcggctatcaaatattctctgatttccggcaccacgagtgtaaaacagataatgccgcagtctgcctttgcaagtgaaatcacttcattgatagtgcctatatcttcaacataaggaattcttcttacatgagtatcatccgccgatccgttaaattggctgagtgctgcttttactaccaattcagccgtttcaccgacggaatccgatacaacatagatgatgcggttattcatattatccccccgttagtttgcaatcttataggatttcattttcagataaactgacaagtattttggtcatatttgtttttgtcactctgccgatcacttcaaagcctttatcggtgtctttgatgacaggcagtgcatcaatttgtttttctattaagtgctttgcaatgtccatcacataatcctcgcgtctgcacaccgtaatgttcggcatccttgtcatgatgatgtgaacagggaccgatgtaagctcctgctggccaatgctcgctctgagcaagtcttttcgtgaaagcaccccgactaaaacagcatcgcggtccaccacaaacagagtacctacatcttctaaaaacatggtgcaaatcgcatcgtacacagaaacgttttcgtgaatcactacggggatagattgaaagtctttcacctgaagctttttgagtttatccgccaaaagctgtgtgccggtttttcccgtatagaaataaccgactctcgggcgcgcctcgaggaatcctgacatggtgagtatggctaaatccgggcgcaatgtcgccctggttaggttcagcttttctgcaatatgctcccctgtaatcggcccgttttcttttacaatctgcaaaatatgttcttgccgtttatttagttcgatcgtactcaccaccttttcacttcatagctatgtaaagaaataataatccatattataacgtaaatatcttgtaatcaaacaaaaaacttataaatggggaaaagacgattaccgatcacacagcaaccgccttttctctctttattttacaataagggcattcatattcgcaaaggacttgatctcatccgccaagcttaccatttgcgctaaacgatttgcctttaatgactcattatccgctataaccattgtatgatcgaagtaagcatcgatcggttcttttaaggctgcaagtgaagcaagcgccgcctcataatcttttttgctgaagttttcctgcagattttgcttcgctgtttggtaggcatcaaacagttttgcttcgtattcattttcaaacagatcaggctgaatgtctccgcggactccttttttgctgatagagatcactcggcctaacgcttcggctgtttccttaaagccaggtgcaccaagcttttgctccagtacttgtgctttatgcagcgcagagtacggctcaagctcagagctttccagcacggcgtcaatgacatcatgtctgatttgttcagcattcaagacatatttcaagcgctgagtgaagaaatccagcagttcattttctttatcggtttgaacgaaagtaagcagctcttcaaatgaaattccccagttgcggtcaagaagaatcgcaacaataccgcttgcttggcggcgcagtccgtaagggtcctgggaaccggtcggaattacgccgatagagaagaatgaagcgattgtgtcaagcttatccgccattgctacaacagctccggtgaaagtagaaggcgtttctccgcccgctgatctaggcatataatgttcattaactgccgcagccacagcttcatcttcgccaagcattctcgcatacttttcgcccataattccttgaagttcagggaattcatatatcatatgcgtcacaaggtcgaatttagaaatttcagcagcccgcttcacatgttttaatgtatcttcatcagcctgaagacgaacggcaagtttctctgcgattgatgtgactctcctaaccttatcagcaagagaaccaagctcttcatggaaaacgatattttcaagtttcttcacatttgcatcaatgtttagtttctgatcttccttgtagaagaatgaagcatcagataaacgtgcgcgcagcactttttcattgcctcgggccacattttcaatcgcgtggctgttgccgtttcggactgtgataaagtgaggcagcaggtcaccgtttttgtctttgacagggaagtagcgctgatgctctttcattgttgtgacaagcacttcttcaggaattgacagaaactcggattcaaatgaaccgtaaagagctgtcgggtattctactaaatgattcacttcatcaagaaggtcttcgtcaactggaatgctccaattgttttcagcagccattgtttccagctgagattgaatcatttgctttcggacgctaggatcagcaataacatgctgttctttcagctgctcttcataagctgaaggtgattcaattgacgcttcatgtccgaggaaacggtgtccctgtgttgtccgtccagactcaacgtttgtgatcgaaaatggaatgacatcctgtccaaataatgcgacaatccatttgatcggtcggatataacgcaaatcttcatttccccagcgcatgtttttcgggaaatgcaagcttgtaattaaaccgctcaattctggcagaagcgacttcgtttcttggccggcttggaatttttgcacgaatacatactctatgccttttacttctttgatgtacaggtcttccacatttgcgccttggccttttgaaaagccgattgccgcttttgtccagttcccgtccgcatcaagggcaatttttttcgcaggcccttttgcttcttcttttatatcatcctgcttttctgcgacatccttaacgaacacagcaagacgtctcggtgtattgaagagtttcacttcaccgtgagtaatatttttttctttaagccagcctgtcagcttgtcgccaagctgaaccatgctttcattcaaaaagcgcgccggcatttcctctaatccgatctctaaaagtaaatcctgtttactcatgagaagaaccctcccctttaagcattgggaaccctagtttttctcgttcctcatagtaggtttttgctacttttctagctaaattccgcactcttgcgatatagcccgtccgctcggtaacagagatcgcacctttggcatcaagcaggttgaaagtgtgcgagcatttcagcacatagtcatatgctggatgaacaagtccgttgtccatttgcttgatcgcttctttttcatatgtgctgaacaattggaacagcatatcgacgtctgatgtttcaaacgtataaacagaatgctcatattcagccatcatgaataaatcttttactgtaaaccctgacgtccattccaagtcaaacacgttttctttatcctggatataagacgcgagacgctcaattccatacgtaatctctacagaaacaggtttacactctaatcccccgacctgctggaaatacgtaaattgtgttatttccattccgtcaagccaaacttcccagcctagacccgcgcagcctaaagacggattctcccagttgtcttcaacaaagcgaatatcgtgctcaagcggatcaattccaagagcacgcaaggaatccaaatacagctcttgaatgttatcaggtgacggtttaataatgacctggaactgatgatgctgatacagtctgttcgggttctccccgtagcggccgtctgccggacgtctggaaggctctacataagccactttccacggctcaggaccgatactgcgcaaaaatgtatacgggctcatcgtgccggctcctttttctacatcgtaagcctgcataagcacacagccctgactggaccaatgcttttgcaaggttagaatcatgtcttgaatattcatttcaagcacctccacttttctttcataagttgactgcgacagcaaccaaaaaactcccgtctctatgcttgccagccgcaaacatagggacgagagttctcccgcggttccaccctagttgctgagaacaaaatcccagcctcttttttaaaattgctcaagaatgcctttcgttgcgtgctcatccttagcttccaccgccctaaggtcgctttcatgaggtaaacgcaagtacttctttctctcactgcaacatattttataataaatgatcatataaaaagatggaccaaaagtcaacttttgttttcacccataagatgtttcatgctttccatttgatctaaaaagcgctttgattttaaatacaatcccgaatattcttcgtaatataaatcaatcacttgctttaattcagcttttgtttcctcttttaaggacacattgccgagcctcgacagatcaaaatagtaaaagagtcttaacagccttgccgtttgcggtttgatcggtatcctgtaaggatctttttcaaaacagcggtggcatataaaaccattatcacgaacagagaaatgaaaggttccgtcttggcttttacaatgtacacaatgatttagctcaggatacaggcccatgacaccgagcatcttcatttgaacaatgaaggtgataacatccggatctgttccttcattcagctgttttaatgactctaatatgaattcaaataaataaggatttggctttttttcttctgtgcctctgtcgactaactcagcaatataggcagcatatgctgttaaaaacaagtcttccctgatgcctctcatgctgaggatcatttccccctgctgaagcgttccgaggcccgatgttttttgcattaagaaagaaccatacaaaaagggctggctgactgctgataaacggctgttcggttttttggcgcctcgtgccataacacctatttttccgtgttctcttgtcagtaaagttacgattttattcgtctctccgtaatcatttgtgcgaagaacgattccttcacattttgtcagcatttccgcaccttcctcaagcaggagcggccaagaggtttataaaattggataatcaaatcgggctagctcatcttctagttcttcgggtctttccatgttctctttttccagttctttaaaaagaagatacgtatcaacatttcctgtttgagaaaatacgttccaggtaaaattcaacacaagaaacccacctttctgtagttaaactagcttacctaaactccaaattcttacctttatcttgaccagatgtcctccatttcatgttaaacaaaatttgctaatgtatccctgttcctgtgagataatgacacacacagctagagattaatattcgtcctctttaaagccaaaatcgcgaagctgggacattttattacgccagtctttctgcactttcacccacaattcaaggtagacacgggagcccaacagtgcttcaatatccgctctcgctctttttccaacctcttttagaaggcttccttttttaccgatcacgatgcctttctgggaatcccgctcgaccacaatcgttgccgctacgtgcacagaaccgttgtcctgccctttgatggattcgatggccaccgcaatgctgtgcgggatttcttctctcgtcaaatgcagcaccttttccctgattaattcagaaatgataaatcgctcagggtggtcagttacctggtcactcggatagaattgcggcccttccggcaaatacgcttcaatctgagcgagcaaggtttcgatgttatttccttctaaagcagaaatcggaacaatttccttaaaaggataacgtttgcggtattcgtcaattagcagaagcaattggtcgggatgaattttatcgattttgtttacgattaagaatacaggcgtagacatcgtctgcaatttctcaatgatgaattcgtcgcccttcccgtagccttcctcagcattgatcataaacaagatcaaatcgacttcttttaatgtattttgcgccactttcatcataaagtccccaagtttatgcttaggtttatgaatccctggtgtgtcaataaaaatggtttgtgatgtgcctgtcgtcagtactccttgcaccttgtttctcgtcgtttggggcttatcgctcatgatcgcgattttttgtccaatgactctgttcaaaaatgtagattttcctacgtttggtcttccaataatggatacaaatcctgatttaaagctttcgttcgtcatgtaaatcctccgatgaaaatgcgcctggcaataattcttccacagtcatttcttttatttgtccttgtaaattagtcagtacgacaataacgtcttttgtgcaaagctcagaaatcacctgtcggcaggctccgcacggagatactggtccaggggtgtcagccgcaacggccagcatctgaaactctgtatccccttcagaaacagctttaaataaagcggtacgctcggcgcaattgcacatgctgtatgccgcgttctcaatattgcagcctctgtacacttttccatccttggtaagaagagcggctcctacttggaatttggaatacggcgcatatgccatatcacgcgcttttaaagcttctgttattaattcttgtctgttcatgtgtacattcctctcttacctataatggtaccgctatcactttatattttacataatcgcgcgctttttttcacgcccatttctaaaaatgtaaaataaatgtaagaattttcagccattacagctttggcaaaaaaataagtaaaccaatgatacacgaaatcacggcaaaaacgcaaacagccccggcggcagcgtccttggccgctttagcaagagggtgatgtttgtcagttattaaatcaaccgtatgttcaatggctgtatttaaaagttcaagcgaaaacataccgcctatcaaaaggaatataatcatccactcaatcatgctgagctctacaaggaagccgcaaatgagaacagcgcaggcggctgcggcatgaaattggaaattccgctccgtccgcgctgtttcccatatgccccggcctgcatgcacgaagcttttgaagaatcgattcagctcatttctatgatcttttgagtccataagcgtccagcaattccttttgcttagtaaacatctcctcttcttcctctttcgtcatatggtcatatcctaaaaggtgcagaaatccgtgtacagctagaaatccgagctctcttttaaaagaatgattatactcctctgcctgctctcttgtgcgatcggcactgatgataatatcacctaaaaccggaggcatttcggcgcccacgatttcgatctcgccttccccctcttcttcaagagcaaatgagatgacatctgtcggagcatcctttccccggtattctttgttaatctgatgtatgtcatcattggaaacaatcgtgacagaaacttcagcctgatcctgaacgccttcacgctcagcggcaaattgaagcagattttctacttctttgagcatctcttctgagacgcttcccgtttcatcaacgatatcaatcagtaaactcatctatttcaccttcttagtagcctccggatattcaatccgggagtggaaaattccttttaatgttgcacagagcgtttttgcgattgtatccagctctttaaatgtcaaatcgcattcactgaactgtccgtcctgaagcttatcggatataataccccggacaagcttttcaattcgttcaggatttggattatgcatggatctgacggccgcttcaacactgtcggccactgatataattgcggcttcctttgactgcggcttcggccccggataacggaactcttcctctgtaatctggtcgcctttttccttcgctttatagtaaaaaaactttaaaagcgaggttccatgatgctgctcagcaatatcgacaagctctttcggaaatttatagcttctcagcatattcgcaccgtctgtcgtatgcgagataataatatttttactcaactgaggtgacagcttgtcatgcggattgtcaatattcatttggttttcaataaaatattgcgggcgctttgtttttccgagatcgtgataatatgcgccgactcttgcaagcaaaccattagccccaaccgcttcacaggctgcctctgataaattggcaaccattacactgtgatgatatgtacctggtgtttctgtcagtattttgcgcaatagcggatggttaggattagacagctcgagcagcctcatggtggataaaatgccaaagcccgtctcaaaaaacggcatcaggccgatgatcaatacagatgaagcaaaccccgacacaacccccatgagcattaacgtgccgatttcaagacccgacagcgcagtgttctggatcaataataaggatagaacgacaaccatattaataaacgccacgaaaagtccggtctgcaaaatctttgatcttgcattgtgttttcctaaaaataatacacctgaaatgccgctgatcaaataataaatccctatgacataattgaatgttcctgtcacaccctgattaaacatcatacttccgcaaatcgcaagaatgatacttcccaaaatggcaatgcgttcattcatcagcagtttgattaagatggcgcctgccgcaatggggaccagatagccgatattattatactccatcttctgaaacaaactgacaacctccatgatcacaagcaaaagtgttgtgataatcgagaataacagaatggattggtttttaaacttcagattttgtttctgtttttcaaaataatatacaagtgttgcaatgaaaagtccgatcataatcaatagcccgctgatcggtttaaagagatttgagttatttaataacccagtcagctcaagtttcctgtacacttcccgatcaatgaggtcattttcttccacgagcacttgcccctgtttgatttggacctgctggacattatctgaggcttcctgccgttttgcctctgttgctttcggatcgaaaacgtaattcggaataatagcaaaacgcccgatttctgtcgcagctcccaagtatttagacggaatagaattgctctttagctctttttctaccttatcctttgcatcagatagtttatccgaggggatttcactgctcatgaccgtatttactgcggtaatgaccgtatctctgacaaaagaaaagtcttcactgtctgctttcagcaatgtcttgatggaatcctccgatatagaatcattcacatctgatgtcaatttgtcctttacagatttgaccattgatttttccgatggtgatttactgccttcctccgatgattttttcacttcactaatactgtcgaatattgatgacacaaggtcaatccgattgtctgtatattctttttttaatgtatattgatcttcaaccgcgtcctcagcggcttgctttttttcctctgtggctttttgatcttctacggttgccggagcgtaaatggtcttgtcgctgactgaaaacaggtctaaatcaagtgtttccggcttaacatgtacaaagagcaaagcaaacataatggcagccagcagaagatacagcagtacatgcatggagcgggcatttttaaaactgctccattttttcgagctgcttttggtcttagccttctttttcaacacaagaacctcctcttgaaacatcaagcccataagcaatcataaaaatgacccgataacgcgcgatcgggtcattcagcattaattttgcttatcgtatgcttcaataattttcgcaacaagcggatgtctgaccacgtctgtctggtctagctcaatcatagaaatgccgtctattcctttcagcatctccttcgctactgcaagtcccgatttgacgcctttcggcagatcaatttggctgacgtcacctgtaatgatcattttagagccaaaacccagtctcgtcaaaaacattttcatttgagcaggcgtggtattttgtgcttcatcaagtataacataagcatcatcgagcgtccgccccctcatatatgcgagcggagcaatttcaatgatgcctctttccatcagacgttctgtatgatctgccccaagcacatcatggagagcgtcatacagcgggcgcaaataaggatctactttttcttttaggtcacctgggagaaaaccaaggctttcaccggcttccacggcaggtcttgttaaaatgatttttttgatatgtccgttttttaaagcatggactgcttttacgacagccaggtacgttttcccggttcccgccggaccaatgccgaatacaaggtcattccgcttcatagcggccacgtattcccgctgtcccattgtttttacacggattgatttgccttttgcgttttttgtaatttcttcttcatacatgctttcaaagtattcaagttcattcttctttgccattttgatggcgtaaatcacatcacgttcagagatctctatccccttgcgaattaaagcgaggagcgatcccagcagcctgtctgcaatctgaaacgattcatcatcgcctgacacataaatcgtctcgccgcgcgtaatgatatttacattcagatctttctccatcaatttcaaaaaagaatcttggttcccgaagagtgaaagcgcctcgtccgggtttttcagtttttgattcatcgcaagtaaatgttctgtcattcttcagtctccctgacaataggtgtggtttgaacgatatcttctataacttggtagagaataatcaactttactttaccattctcaacagtctggtgcaaaactttttcacttttcacctcgccgttttcgcctattttatcctctacatcctgtttacccaatttaatgccttcttgaactgcttcttctttcgtatattttcgcaaagcctcttcactttctctcgtttgctctttgacataggatacagggagcttaaatccgagaaaatgaagcgaatgcttttcttgttctgtttttggatgcttcaattcctcttttttaaacgtcatcccccagatcgggattgccaaagaaccaaaagaaagcttgtgctttgtccttactttgcccgtatagacgttaaataatgtttcaagcgggactgtcacttctgatctataccaggtttctccgtaaatttctgcttttgaggcgacttcctgctgatggtcttcgctgccgatcagtcccgaaacaagcagctgtcccttttcaacatgatcgtgtatggcggccatgggctgtcctttttgcacaaacattctcgtaatggttgctttctttttggcgacaatattgcgcgggctaacatatttttctttttcgggctcatttttctccacaactttcatatgaatggtcgtccccttcagatcaactccgacccaagtgatattgtctattccattggttaatgatttctgtattttttcgggcgacatcattaaaaactgcagacggccctttttgacgccgatttcattaagatgctgcctcatttgatgttctgtttcaggcttagcgcctgtcacatcaattttccacaccatattggacagcaaaaacaaaagaatgaaaaaaatcgcaaaaccgatcgtaaaccctatattcagctttgatttcagcaacaggaagggaaatcccttccgattgataaatcgggctttacatttaaatttacttcttacccgccgaaaggcatgtacatcctgaagctgtatatataacgatacggcttctttcttttttttgacatgaaagaccggaatcccctgtcttgtgcattcattaaggagccgctcaatccctcttcccgtcaattcaagctggaccttacccgaaaaaaaagacagccatttatttttcacaacatttccccctcggctttatgactcaacatatcgaacgacatcaatcgtaccctccaaaagtatctcttccggaagaatcgccttgatgacaaaatttttaccagatatgatgcactggccctgcttcagcatcagccgcacttcattctcactgaaaagcaaaaggcctctgtggttttctatgtagatatgaagtctgccaaccattgtaatcctcggcagatccatcataacgtccgggggaatttccaatgctcttgtcagccaagctttcatacgattctttctttgccccatacaaaaagaaccccctttcatctcatatgtatgatttgaaaggaggttctaacactttaatttttacgggccgggcgcatcgtacggtgaggttttttcgcccgtggaggtccgaacacctctcctagaacgatcccctgtacgacggtgtctttattcacctgaagcattttttgttttgtgtatactgttttttgtttggcagcagcaagatctcgttccagccctttcaggtttcttgctgtttccctgcgtctttcttccgcttcccgtcttgcctgttccatacggttagggataggtgcaggggcatcttcttttgactgcttcttttgaggagaagcagattgcatgtgttgaggttttttacttttttggctgttttgcttttcttctttgctctttttgccgaaaatcgcagaaatgattccgatgatcgctgcaataataagcggattggtcagtaaatcttccatcagcgttctcccttcttagagagattatgatttgcggtcttcatccgaagggtctttcgtcagcttgccgaatgaatcacgcatttctgtgtcagcatcgatgttcttgatattcatgtaatccatgacgccaatattcccttcacgcaaagcttctgccatcgcaagcggcacttccgcctcggcttctaccactttcgcgcgcatttcttctacgcgggcacgcatttcctgttcttgagcgacagccatcgcacgtcgttcttccgcttttgcctgcgcgatgtttttatcagcctcggcctgatcggtttgtaaaattgccccgatgtttttgccgatatctacatctgcaatatcaattgagagaatttcaaacgcagttcctgagtccaatccttttccaaggactgtctgagaaatcatgtcagggttttcaagcacttttttatgattatcagatgaaccgattgtagaaacgatcccctcacctacacgagctacaatggtttcttcccctgctcccccaacgaggcgctcgatattcgctcttactgtgattctcgctttcgctttcacttcaatcccgtccattgcaacaccggcaatgaacggtgtttcaatcaccttaggattaacgctcatttgaacagcttccaacacgtcccggcctgcaagatcaatggcagcacagcgctcgaatgtgagttcaatgttagctcgctgagcggcgataagcgcgttgacgactctgtcaacattacctccagccaggtagtggctttcaagctggtttgttccaacattaagtcccgctttatgggctttaatcagcgggttaacaacccgattcggaatgacacggcgaagcctcatcccaactagagtgaaaatgctgattttcactccggctgccaaagctgaaatccaaagcattacaggcacaaatgtaaaaaatactgccaaaacaatgatcgctactgcgacaattgccagaatcataagtgttgacggatccatataacttctcctcgtttctatttaaatttctctcacgacaatgcgtgagccttctactttaatcacttttacttttttatctttttctgtaaacgatccctccgaaacaacgtcaaggcgttcatcatcaataatcacggtaccggaaggacgcagcggtgtaaaggttatacccacttttcccattaagtccgtgcgcgtttgatttgaaacgtagccgctctccgtgtttgtagaatcatttaatatcaatttcttaaagaatttcatacgctttcccaacacccttgtcagtaaaataaaagctgtaatcgaaacagctgaggcgatcaagagagaaaccgccatgacagtgaagctccccgcggctaaaaacaggctcgcaataatcgctcccaaacccagtaatccaatgattcctccgggaagaaaaatctcaagcagaatgagaatcacccctgctataaagaggagaaccgtctcatacccggcaaggccggctgcaagatgcccgtaaaagaacagcaataacgcaatgagtccagccgttccagggaggccgacacccggggaaaaaagctctaccgtcagacctaaaaaagcgattgtcagcagaatagggacaatgaccggattcgtcagccatcttgctgtcttttctgcaaagctctcctttgcatagctgatctgcgccttttcgaacccaagcttctttacgagcgtggacaaattgtcagcagtgccttctgaatagcctacctcaatcgccttgtctgcgttaagtgtcagcagatctcccttaggcgcgccaacttccttggcatctatatctgggtcagccattgcgagcgcatattttggatcgcggttatttttcactgcggcatcttccatctctgccagccaaagtgattgagctttttggtcagcggcattgccttggccatcaacaatcgcggaggctcccatttttccgccaggcgccatataaatgtgatctgcttgaagtgcaatatatgcaccagcagacaacgcgcgtttgttgacatatgcagttacggggatctcactttcggttatcaaatcggccatatcaatagcagatttgaccaatccccccggggtattgatatcaagaataatatggtctgcatgtgcatcctttgcgtcttgtaacgaacgggacaaaaacgaggcgagaccctgttcgacatttttttcaaccgggatcacataaacagtttgtttttctgcttttgcgttcagctgtacgcctaataaagaaagtaaaaatatacccaaaagagcagcacggaatcctttgatttgaagcaagggcggtgtatccctccttccttttataataagtgccttctcttcatacgtaacaaatgtatcaaaggtttcatttttttatgtataaaaaaagacatctctcttagaaagatgtccttttctttgccatttaagacagttgactgctcacaagcttattaattaaacttccgtcagctttaccttttactttaggcataattgcccccatcactttgcctatgtccgcttttgagctcgcaccgacctccgcgatggtttcatttacgattgtacgcagctcttcttctgacagctgctcaggtaaataaacttctaaaatgtccagctctttttgaactttatctactaaatctaaacgattagcgtttgaaaattcctggagggagtctttacgttgcttaagttcacgagaaaggacagtgagttcctcatcctcggtcaaactgtctttcttaagcttaattgcttcattttgaagtgaagccttaaccattcgaacgacagtcagtttgtctttctcacggtttttcatatacagcttcatatcctggttgagacgctcaagaagactcataaatccaccctcttttagaatttgcgttttctagcagcttcagactttttcttgcgctttacgctaggtttttcataaaattcacgctttcttgcttcttgcaaagtacctgtctttgatacactgcgtttgaagcgacgaagagcatcttcaagcgattcgttttttctaacgaccgtttttgacattctctttccctccctccgaatacaccaatcgactacctttaagttacacatataaacatgtactttgacattataatataagccatcagtcaggtcaactaagtgagttcacttttccgtcatgagtgcgactgcctgtctatataatgaaagaaaggggttggtgaataggatgttaattctgattagctttactgctcttatattattctttctcgcaggcatgaacatgcttcgaaaaggcttaatttctatggcgtactcaaaaattgaagaacgtttgcttttatttacggaccatccgttaaaagcgtttcttatcagcattgtatttacgggaatacttcagagcagttcagcttttatggtcattgtcatcggctttgtaagtgcgggcgttctttcttttaagcggacgataccaatgattctggggacgaatgttggctctacttttacaactgaatttattgctatcaaaatggatattttgatctgggttcttttaataggaggtttattgttttttctgactggcaggtatcctttgaaacagctgggaacaagcttccttggactgggcatcatcttcttttgcatcagcggattcagccatcttgccgggccgctgacaaagctgaaaacgggagccgacgttctataccatgttaacgattcaaactggtccgctttgctcatcgggatggtgttaactgccatcattcactccagttctgtctgtatcggcattttgatgagttttatgaatgaagggattatcggactgacacaggcgatgagcgtcgtactcggatcaaatatcgggacatgcattacagctgtcatggctgctgtatccgggggatatgcggcgaaacagacagcgtatgcgcatgtggtatttaacgtgctaggggtggctctagtattgccttttctgaccgcagcgaccggctttgtagagcagttatcacccgatcctgcccaaaggattgctcatttcagccttttatttaatgtggtgacagctcttttgtttcttccgcttacaaacttgttttaccgcttgattcactttcttatcccggctaaataaaaaaccggtacattttaatgcaccgattttttaggttaagaagacaaacgcatatgttcagttatttcatcctcaaccacacggacaaactgtccttcgttgtaaggataacctgcttttaggattttgacttttacgattttgccgatcatatcttccgtgcctttgaaaacaaccttcatataattgtctgtgtaaccgacaaacatgttctcttcttctgtttctttataggcttcctcaggaataatctcaagcacttcattttcatactgagaagcgtattcttttgcaagctggtcagaaagagcaatcaggcggtgcacacgttcgtttttcacgttttcatccacttggtcttccattcgcgcagctggtgttcctgtacgtttactgtaagggaaaacatgtagctcagagaatttatgttctttaataaagttataggtttccataaattcttcttctgtttctccagggaacccgacgatgacatcagaagtaacagctaagcctggcagtgcttttttcaatttatttaaacggtctgcaaagaattccattgtatacttgcgtctcatccgtttaagcactgtgtttgatccggattggataggaatatgcaaatgattcactatcttatctgagcggtctaagacctcgatcacttcgtcagtgatttggctggcttcgattgaagaaattctgatccgtttcacgccttccacacgggtgtctaattcgctcaaaagcttagcgaagttgtaatctttcatatcttcgccgtagccgcctgtatgaatacccgtaagaacaatttccttatatccggcatcaacaagctgctgcgcttgtttaatgacctcttcaggatcgcgggagcggagcaggcctctcgcccacggaatgatacagaatgtgcagaaattattgcagccctcctgtattttcaatgacgctcttgtgcggtccgtgaaagcaggcacatcaagctcttcatatactcttgctttcatgatgttgctgacgccattaatcggctggcgttcttctcggtattggtcaatgtagccaagcattttttcacggtcctgtgttccgactacaatgtcgacaccggggatcgccataatctcagcaggtgaggtttgcgcgtagcagcctgtgacacagatgacaccgtcaggattttgacgaatggcgcgtctgatcacttggcggctttttttatctcccgtatttgtaaccgtacatgtattaatgacatatacatcagctgtttgttcaaagtctcttctttcatagcccgcttctttgaaaagctgccagattgcttctgtttcataatggttgactttacagccaagcgtatggaaagcaacagttgccattactgatcacctcttaataactctgtttgataagaaatcgcgctcaacgcgtatagcggagcggtttctgtccttaaaattctcggtccaaggccgcacggcacaccgtcttgctctgtgagccgttcaacctccgcttctgttaaaccgccttcgggaccaaatacgatcaatagagatgatcccttcggaaggctgcttacaatcgcgctgaatgcgcttatttccccttgcttcgatgactcctcgtatgcaacgacacatttatcgaaatcctgcatcctttgaagaagctgctgaaaagaatggacatccatcactcgcggcacttcgttacggtacgattgctcagccgcttcctttgcaattttcgtccatctttcccgctttttctttgcctttttgtcatccagcttgacaacagaacgcgcggcttggaaaggaataaaggcatgagctccgagctcagtccccttttggataatccattcaagcttatctcctttcggaaggccgctcgcaatatagacctttatcggaagctctctgttttcattcgtccattctatcacaaggcaggacactttatctttggaaacagattgaagttcacattttgcctcgaagccgtcttgagagcagcagataatctgatctccctcattcattctcatcacgttcacaatatgatgaacatcttcgccggtaatcgaaaaagccggcgcttcctctatttgctgcttcgtgagctcgataaaatatcgttgcatacgctgtgacacctactaactgttattttttcgcaataatgctgacccaatcttccattgaaaggatttctacaatggtaaagccagcttgttccagtgcttcttttacttcttgttttttatgaccgatgattcctgacgtaataaagtggccgccttcttttaagaggctgtacgcttgtgaagtaaagcgaagaatgacttcagccaaaatgttggccacaatcacatcatgttccccttcaatcccgtctaacaaattgttttgcttcacttgagcaatatcgctgactttgttcagcttgagattaaggcgtgcactttctacagccacgggatcaagatcgtaggcatgaaccgattcagcctcaagcattgcagccgcaatacttaaaattcccgaaccagtgccgacatcaatcaccttatcacccttttgcacaaagcgttcaagcgcctgaatgcagagtacggttgtcggatgtgtccctgtgccgaaagccattcccgggtccatttcaataatcagttcatcagtatggaccggcgtatattcctcccacgtcggcacaattgtaaacttttcagaaattttcacaggatgataatactttttccaggcagtcgcccactcttcttcatttacttcagaaatagtgatgtggtttctgcccaaatcaatattgtaaagaaggagattattaatcgtttctttgatgccgtctacagtttcgcccagaaaactgttaaccggcagatatgctttgacaatgacaccctcatctgggtaatcattggggtcgagctggtagatttccccgtacacattctcacgttctttaattaaatcaagcgggtcctctatcacaaccccacttgcaccagcttcatgcaatatatttgagataggttcgaccgcttcatgtgttgtgtgaatgcttaattcggaccatttcaaaactaccaactcctcatccaataattaatcgcctttaaacgcccgttttaccttgtcaaagaaactcatttcctgttcgtcaggcaggtttccgctgacttcggcaaattcgcggataatgtctttttgtttatctgtcagatttgtcggcgtaacgacgcggacgacgatatgctggtcaccctgtccatagcctctgacattttgaacgcctttgcctcttaatctaaatttcgttcctgtttgtgtaccggccggaattttcaatttcacttttccatgcagcgtcggcacttctacctcatctccaagagcagcctgagcaaacgttaacggcatttcacagtaaatatcatcgccgtcacgctcgaagaactcgtgtgcgcgtacatggaacacgacaaataaatccccagcagggccgccgtttattcctggttcaccctgtcccgagagacgaagctgctgcccgtcatctacaccggctggaattgtcacattgattttcttgcgttttttgatttttcctttgccgccgcagtccgcacatttgtttttaatgattttgcctgtaccttcacagtggtggcagacccgtctgttaacgacttttccaaacggtgtattttgctccacgtttaactggccggagcctccgcagtgggagcatgtttctggatttgttccaggtttcgcacctgagcctttacatgtttcgcacgtttcctcgcggggaatttcgatggttgtttctttaccgaaagccgcatcctcaaacgacagggtcatcgtatactgtaaatcagcaccctggcgcggagcgtttggatctctccgtcttgtgcctccgccgaaaatacttgagaaaatatcatcgaaaccaaaaccgccgaaatcgccgccgccaaaacctccgccgccgaagccttggttagggtcagtgtgaccaaattgatcgtaatgcgcacgtttttggtcatctgacagcgtttcgtacgcttcttttacctctttaaatttttcatctgatccggcttctttgttaatatcaggatgatatttttttgacagcttccgataagcttttttaatttcatcctttgaagcgctcttacttactcccagcacttcatagtaatcacgcttactcatctcgcttcactctcccgaatttctcacataaattagattgtatcattttgaattatgatttttcaattccttttatcccgggcaagaaaaaaagtcaaagccaagagatgcctgactttgactttctaatcattgaatcagattatgaaatgtgttcttttcggtcagctccggaagcggggctgacactaaaaagaacttattttttgttttggtcgtcgtttacttcttcgtattcagcgtcgacaacgttgtcatccgctttgccttcagcgtttgctccgccttgagcttgctgtgctttagcagcttcttcataaagcttcatagaaagctcttgaacgattgtttgaagctcatcctttttcgctttgatctcttcaaattcgtttttctcaatcgctgcttttaaagcatctttggcatcgttggcttttttcacttgttcttcgtccactttgccttcaagatcttttaatgttttctcagtttggaaaacaagctgatctgcttcgttgcggacttcgatttcttcttttttcttcgcatcagcgtcagcattttcttccgcttcttttaccatgcgttcgatctcttcatcagagagacctgaagaagatttgattgtaatgttttgttcttttcctgtgcctaagtcttttgctcttacgtttacgataccgtttttgtcaatatcgaaagaaacttcgatttgaggcacgccgcgcggtgctggcgggatatcagtaagctggaagcggccgagtgttttgttgtcggcagacattgggcgctcaccttgaagaacatggatatcaacagctgtttggttatcagcagcagttgagaacacttgagatttgcttgtcgggatcgtcgtgttgcggtcgatcagttttgtaaacacaccgcccattgtttcgataccgagagaaagcggtgtaacgtcaagaagaacaacatcttttacgtcacctgtgataacgccgccctgaatcgcagcaccaagcgctacaacttcatccgggtttacgcctttatgcgcttcttttccagtttcttttttgattgcttcttgtacggcagggatacgagttgatccgccgacaaggatgactttgtcgatttcgcttgcagaaagtcctgcatcttgaagcgcttgacggacaggacccattgtgcgctctactaaatgagaagaaagctcttcgaatttagcgcgagttaatgtaagttcaaggtgaagcggtcctgcttctccagctgtgataaacggtaaagaaatttgcgtagaagatacgccggaaagatcttttttcgctttttcagctgcgtctttcaaacgctgaagcgccattttgtcttttgacaaatcaatgccgttttcttttttgaattcagacacaagatgatcgatgataacttggtcaaaatcgtccccacccagacggttgtcgccggcagttgaacgaacttcgaatacaccgtcgccaagctcaaggatggaaacgtcgaatgtaccgccgccaaggtcgtatactaggatcgtttgatcttcatctgttttatcaagtccgtatgcaagcgctgctgcagtcggctcgttgatgatacgttctacttcaagacctgcaattttaccagcgtcttttgttgcttgacgctcagcatcgttaaagtatgcaggaactgtgataactgcttttgatactgtttcgccaagatagctttcagcgtatgatttaaggtgttgaaggatgatagcagacacttcttgtggagtgtaatcctttccttcaatttcaactttataatcagtacccatatgacgtttgatagacataattgtgttagggtttgtaatagattggcgtttagccacttcccctacttgacgttcgccgtttttaaatgcaacaactgatggcgttgtgcggtttccttcagcgttagcaataactttaggctcgccgccttcaagcactgccacacatgagtttgttgttcctaagtcgattccgataactttactcacttgaataacctcctgctatgtaattattgattcactttgaccatggaagggcgaatgacgcgatccttcagcttatagcctttttgcatttcctcaacaacaatgttggagccgtagttttcgtcttcagcctgcataacagcttggtgcagattaggatcaaattcctgccctacagcttcgatggcttcgacgccttcttttttcaaggcttctacgagctgacggtggaccatttccattccctggagcaaacttttcgtctgttcattgtcggcttcaacctgaagcgctcgttcaaagctgtcaagagccggcagtaaatcagtcacgatattttgagaacggtatttttgggacgcttccatctctaaacggctgcgtcgtttatagttttcaaagtctgcttgaacacgcaaaagtttgttttctttttcctcaagcaaaccttgcaattcgttaatttggttttgaagaagttcgctttcatttgtttcttcctgctgttcatcagcggcagcttgttcttcaatgatttcttgctcttctgtttcgttttgttcaacggtttgtttttcttctgacattgtgttcacctccctcaaagtgtaaggagaaggacaggtgctgcccttcgataaaatttgccaaaattcccttattcatcatacagacttgttaatgcttttgacaagtccgaagtcacatgctgaagcaggctgacaaccctggaataattcatgcgggtcgggccgatgatcgcaattgagccgatctgcttctggtctacggaataagaagccgttatcagactgcaattttccatctcttcatagtcgttttcttttccgattttaatcgaaattcccgtgtgcggggattgaaccagctttaaaacatcctgttctttctcaattaatgaaaggagcgaccgaactctggtgatatcatggaactcaggctggttcagcatattgattttcccgccaaaaaacaacttttcaacgtgatttgtggaatgaaatgttgaacgaagcgcgtcgagtatattgtcatagtttttaatgtgctgtcttaggtacatgacaacttccttaaatatgcgctcattcagttcatccattggaacgccgcttaaacggtcgttcagtatatttaccagtttttcaatatcagacagatccattttggtcggaaagttaatcgttttgttttccacatgccccgtattggtaacgagaatcgctaccgccatatcaggctgaatcggaatgatttgaatctgtttaaggtaattctcactcaacttcggcccgagtacgatggatgtgtaattcgtcagatcggacaaaatttgcgctgatttttgaactgtcttctccagctcgaaaattttctctttgaagatcgagtggatttggtccaggtcgcttttcgtcaatttgacgggtgacagcaaatggtcaacatagtaccgataccctttttctgacggaacacgtcctgaggatgaatgggttttttcaataaagcccaattcctccaagtcagccatctcgtttcttattgttgcagagctaaatgtgatttcatcttttttcgaaagagttcttgatcccaccggctgtgccgatttaataaaatcgttgattataacctgaaggatcagcagctgacgatttgttaacatcatcatcacctctgttagcactctcaataagcgagtgctaattctataacaaaagtatcaaaccacaagaaaaatgtcaattataactcacccaaaaaagcgccaaaaacttcattgcctaataatttcccttgatgagtcaaataaacggcagactccgaattgtgaatcagccctttttcagcgaggtcttttaacacgcttgggaaaagtccatccagggaacggccgtatttttctgcgaatcgttttttgctgacaccggctgtttttctcaaacctaaaaacatttcttcctcaatctgttcttctgttgttacttcatgtgtatctctgtacggaaaacccttttcagctatcaggtcaatgtaatgcttaacaggtccgacgttcactgttcgtgtgccgccgatatatccgtgagcgccggctccgaaaccgaaatattgttcgttgctccaatacgttagattatgcttagattccatgcctgccttagcaaagttgctgatttcatattgatgaatgccgtgagcttccatctggctcatcaccatttcatacatttcagcttcctgctcctgcggcggaagatgaagccgccctttttgcatcaaattataaaataccgttttcggttctacaataagggagtaaacggaataatgctcggcatccagtgataaagcagtgtttatggaatgttccagatgcttgagggtttgccccggaagcccgaacatgagatcaagactgatattctcaaaaccgatttcccgcgctctttcaaaagaggtgaatacatctttttgcttgtgcactcggccgattttttctaacagatcgtcttcgaacgtttgcacaccaaagctgaggcgatttacgcctgcttcttttaatatttttaatttctctgcggacaagtcgtccggattcgcttcaaccgcaaattccgataagtcgcttgagggctttagcacgcggttgatcatatctatcagctttttaagctgttcctcagacagggaggtcggcgtgcctcctccgataaagattgttttaagatcaggctgcccggtttttgctattgtatttatcatttcctgttcgagtgcgtttaaatactcgtcgactggctgactttgaataaaatatttattgaaatcgcagtagtggcaaatatgctcacaaaatgggatatggatataagctgatttcaacggattcaccttctttacagaaagaagccgcagtacaagactgcggcggcttctattgttttttcggactgtcgtccattttcagaactgccataaatgcttcttgcggcacttcaactgagccgacctgcttcatacggcgttttccttctttttgtttttcaagaagtttccgtttacgcgagatgtcccctccgtaacatttagccaatacgtttttacgcattgcttttatggtggagcgggccacgattttctggccgattgcggcttgtaccggaacttcaaactgctggcgcggaatgagttctttcagtttttcaacgatcacttttccccgttcatatgcgtaatcacgatgcacgataaaggaaagggcatcgattttttcaccattcagcataatgtccattttcacaagcttggacggtttgtagccgatcagttcataatcaaaggacgcatagcctttagtgcttgatttcagctgatcaaaaaactcatatacgatttccgctaatggcatatcataaatgatgctgacacggtttgcgtctaaatactgcatatcaatgaaattgccgcgttttccttggcaaagctccattacagcgccgacatagtcattcggcaccatcatcgtcgcttttacgtatggctcctcaaccctttcgatcttttgaggatccggcatgttggacgggttgtcgacaacgaccttttcgccgtctgtcatatacacgtcatagataacgcttggcgctgtcgtaatcaggtcgatgttgaactcacgctcaattctctcctgaatgatctccatgtgaagcatgcctaaaaatccgcagcggaacccgaatccaagcgcttgcgaagtttccgcttcatattgaagggaggaatcattcagctcaagcttttcaagagcttcccttaaatcattatacttcgctgtatcaatcggatacaaaccacagtacaccatcgggtttagcttgcggtatcccggcagcgcttcttctgcaggattggcagcgctcgttattgtatcaccgacacgtgtgtcaccaacatttttgattgaggcagtcaggaagcctacatcaccgaccgtcagttcatttgtcggagttgctttcggcgtgaacacgcccacctctgttacttcgaattctttgccggttgccatcattttgattttttgtcccggctttaccgttccttcaacgactctgatataagccacgacaccgcggtaggcgtcataaagcgagtcgaagatcagcgctttgagcggcgcctccggatctccggtcggagctggcaccttttctacgatttgttctaaaatctcctcaataccgataccggcttttgctgaagcaagcacggcttctgatgcgtcaaggccgataacgtcttctacctcttggcgcacacgttcgggctcggcgctcggaaggtcgattttattgatgaccggaaggatttcaagatcgttgtcaagcgctaagtagacattggcgagcgtctgcgcttcaatcccctgggctgcatccacgacaagaatcgctccctcgcaggcagcaaggcttcgggatacttcatacgtgaagtcgacgtgtcccggcgtatcgattagatgaaagatatattcttctccgtcttttgctttatatttaagctgaacagagtttaatttaatggttatgccccgctcacgttcaagatccatagaatcgagcaattgttctttcatttctcgttgagtgattgccgacgttttttctaaaatacgatccgctaaggtcgattttccgtggtcaatatgggcaatgatagagaaattccgtattctcgattgcctctctaaacgcttttctttatctgtcacaatctatcactcctactattaaacgcaaaatacactagcttagattatatcaataggattgtaaagattcaatgtaaaacaagaaagagaaaagttccctatcatatctgggttgcttttctctttcacgtacttattgattcatatcccgtatccattcatacattgactgggcagtattggttacggtgtccgaaagcgcttttccggcttttgaaaacatattgaatgtctccaccttttccagctctttttgtttttcttctaaatcttttgccgtgactgtttctcctaggattgaggcttctttttcattatcttttccgtcggtgagcgtaaacgcccccttcagtgaagggtcatgatagcctttcatactcagcatcccgtggtttgcctgctgcatgccgaacagaacgcctaaaaacatgatcgtgacaagcagtaagcactttccaaagtatgcaatcaaatcaaccacctatttcttattgttttttcgtctccccgctcgctgcgttgaccttttcagcatcccagtacatttcgctgaatacgtccgcggccgcgttagccgcacgctgcagctcttcgagattattatccactccgccaaactcgagcaaaagcgctctatcggttaaatcctgattgtaaacaccattatcgcctggcgagcctttggaaaagacacctgtgctaagtccggggtattttttctccatcagtttatgaagctcactcgcaattttatagttttcttcgaagtttttgctttttttcccgacgacaaaggctaccctggcatagcttttccctttaatcgttgcggttgtgtcttttttgcgccgagagtctctgtggatgtcaatgatatattgcagatttttgtttgaagcgagggcgtctttcacgaccggccttgattcatcataggacctggcatagtttaagccttttttattcaattttgactgtatatcggttttattcactgtggctccgattccctgggattcaagcgcttgtccgaacatatctcctacaagcgtgacattggctttagaatggcgcgccatgtcaggatcggtctcgccttttaatagagggagatatgattccgtattgtgcgtgtgatagataaacacgacctttttatcacctgttgtttgtttcggcggatctttttgcgcattatctgattgcgtttgctgtttttcaatctctgccaaattcgcttctctttcttcctccatcaccttagacggcggcggcgattccgcaggcatattcgtataatccgttccttgtccagctaacaaaatctcggtatcaaattgtgcaaatcctggcagctcccgaccgagaaagctccgcggatcttcgaggttaatgctcgtcgccagctttaaagaaagacgagaaagatgaaatgagctgtctgtttgagagaggtcagaagcgaaataatggttttccatctgcagcaaatgtgcaaatacgtcacccggcaattcttcagcaatcccataaaaagagtcagacgacggcctaagttccggccggagagacgtcagcacaccggatagaacaaaaatcacgataaggcttacgataaatagaaagatggcttttaccgctttccctccatttaccgcaacaacaatctgtctgtttctgcgtttatttctcattgaatccctccagcgcttgtctagtaattactctatgaacaagctagaggaagtagaactgtttagtgattgtaggagcctttgttttcttgtgacactttttcatgaagcgctgtgtttaatccgttcgctaaaacatttgccatatcgtcgataaatgaatcgacttccttcggtgtaaccattaagttgtgccctaaaggcgaaagcacctcgtgaatgagctgccgtttttcatcttcttgaagggttccgacaatacctaggaacgattggcgctgcttttgatcgggaagatcgtcttcagtgagcactttctttttcccaaacgtcatgcctgccggaacaagcgatcttgatggcctgttatccttcatttctctgccaaaatgttttaatatgtagtccaccgtgtcgctggcaattgtcacggcatcaactactgtcggaacaccgatagcaatcaccggaacaccaagcgtgtctttgcttaaatcttttcgtttattccccactccagaccccgggtgaatgcctgtatccgatatttgaatggttgtgttgaccctttccaccgcccgcgccgccaacgcatcaatggcgatgacaaaatcaggcttcgattgctcaatcacacctttaataatgtcacttgtttcgattcctgttatccccattacacccggtgcaaaagcactgacaggcctgtaaccctcctgtacgttttccggctgaagcttaaacaagtgccttgttaccaacagattttctactgccatcggtccaagcgcatcaggtgtcacgttccagttgccgagcccaacgatcaaacagctcgcatcttttgagatattaaggttttcaagaaaagctgagaattcctccgcaaagacagcagagaccttctcttgcatttccgaatcattctccctgattccctgtgcttcaagcgttaaatagcgcccttctttttttcccgaaagctctgcgccttcctttgtaacatcaactgtgcggattttaatgccgccgtgatcacgctctttttcaataaagcctttaatttcttttgtcggcacagcctgctgattggccattgcttccttcgtttccactgccaaatcggtccgtatcaaatactgattcacatccagctcactctttttcatacaggggcctccttcacattaagtacctatattgttgccatttgctgaataaatcatgctaaaaagagaaccttcaatgaaaaatactttacatttatattgcaatctaaaggtgtgtttgatagaatacaatttgttctattgtgaagaagatttaaccttaagacactgtgctacaggttgtatcttaggaggtgaaacacatgccaaacattaaatcagcgattaaacgtacaaaaacaaacaacgaacgccgcgttcataacgcgacaatcaaatctgctatgcgtactgcaatcaaacaagttgaagcttctgttgccaacaacgaagttgacaaagcgaaaactgctcttactgaagcagctaaacgtattgataaagcagtgaaaacaggtcttgtacacaaaaataccgcagctcgatacaaatcaagactagcgaaaaaagtgaacggactttctgcataatataaaaacgatcctcaataatggggatcgtttttttcatttctttttaacagctgtaaaaggaacagttcgagcaggagctgcttgtcctttttcccggttttcatctcatagtccatgacggcaagctgttcaataattaaacggagctcctcctctgaaaaaagccttgcttgatccatcgccagctttacccgaaatgggtgaacttttagattagaagcgatttgtttttgtccgtatccctgttccgcgaagtacttcgtctgcagaatcagccggaactgattcgaaataagcgccataattttgatcggttcttcattttgttttagcaaatcataaaaaatttgcagactctctgttcgttttcggttgacgattttattgatcagctcaaaaatattttgttcaaggcttctagcaacaagcatttttacatcatccagcgtaatttcttcacgatctccaataaacgtgcagagcttttgaatctcctgaaaaatcgatgacagatgaccgttcacaagcagaaccaaatgctccgccgcttccgtgccgattgttttctgctctgtttttgcaaggttgacagtaaagtctgtcgtttcctttgcatttaattccttcgcctccatcataaacgcgtgcttctttaacgctttcgtcagcttttttcgctcatcaagcttttcatacggagcaagcaggacaaagactgtgtaaggcgcaggtgattgtatatatgattcaagcgcactgacgttgtgctcaattttttcttttttcttttcacctgttaaaaaatatggatttttcacaatgacaagacgccgctcccccataaacggaaacgtttcagcatctgcaatcgcttgatccagcgggtcctcttccagatcaaaaacggatagattgaaatcctttgtctcctgatcaacgaccgtctgtctgatcctgctgacggtttcttgcagcagatatgtctcttttccgtataaacaataaactggatggacatctccttttttcaggcttttccacacatcaaataccattgttgtacgacttcctctctttcatcatccccttctatcctaaattgagtttgcaaaatagtaaagaggaagcctgactgctgcttccccatttatattaaacgcctgttcgcaagcccccgggacagcttgtaaaaaggcgataatcaccagaacagaaaacgttaccttagcttctagatttttcaaaacaattccattatacttaagtcagtcaggagggataaagttgaatgattttgaaaaaaacgttcaaagcaaacgaaatgatgctgtagattcagctgttggttttgttgtgtccttcggatttttcgccttcttgtttgtcatggcaacggttattcacctagttggttcataacagcgactgcccgggctgctgatttctcggcagtcttttttagttcgtctctgttatatctgatgtatcatatggaggatagacagaaaaggttccaactctgtttttgtatctatattggatcgttccgttttgatctgttcgcagcacgcggatagaatgtctctgtaatagttgcagaacttcttgatgaggatgatggtaccgattgtttttcccggctgagataatggccgttttcggctgaagctgttggatgaattcttcaccggtagagcctttgctcccatggtgccccacctttaagacatctgctttaatatttggaaacacgtccatcacctcctgttccccttctttctccaggtcacccgtcaagatccagctcataccgcccgtctccatccacagaacgagagaggaattatttttgcttgccggatcaggtgctccaggtgacagtacatggaactgcaaatcctttatttgcaatacatctcctcgcttcacctcttcaattgtcactccctcttctctggctgtctgcagcactttctcatctttaggttcagaaacgaaccctttcggaatcacgaggcgctttactttatgatgcttcagcagagtctccgcctctccgatatgatcttggtcagcgtgcgtcagaattaaagcgtcaagctgtttgattcccttagcagttaaaaacggaatcagcaccttttcccccagtgaaaacggatgctgtttttcgcgccaaggctctgacgagtaagacaaagtgccgccggtatcaattaagacacgcccccgctgatgcggagcacctacaaacatgctgtcaccctgtccaatatctatcatatccacttctccttcggaactaagacacggatatataaagagcagaaacagcaccgtgcagcaaatgcctccggttaccatcaactgcgacaaggagcgtttttcaatcgccataagcaataggatgatcgtgaccgtgaataaaaaaagcaaaacaggtgcaggatgtgcgatcataatcgtgaacacatcaacatctgcaatgtttgtgattagcctattggtccagcttatcaataaatcaaaccagctgaaaaacaatctcccaaacgaagcggaaagacttaatagaagaacacctgctacagctcccggcaaaatacagaaggtataaaatggtaccatcaacatattcatcggtacgctgatgatagaaaactgatgaaaatgatatagaagaatcggaagcgagcccagctgagcgatgagtgatacaattgtcagctgtcccaaggaggttttaacctgctgaaaaatagaagaggatagaattaaagaaaaactgacggcgaacgatagctgaaaaccggcttcaaagagatgataaggattgaagagcagaaggacgatgtatgaaaggcaaattgcagttgcagagtggacacgccatttgacaaggcttccagctaagtaaacacccgacatgagagcggcgcgtagcactgaaggagcagcgccggtcaacatcacatagagcggcagaaataacagcaacagaattgacgccttttctctagttataccaaggcgaatcatgatataaaacaaacctgctgtcaaaatccccacgtggagtcctgatattgccaagagatggacaacaccaagcttttgatacgcggtaagcacttcatcctccacataaaatctgtcaccaactgtaagtgcctgtacaatccctgctgaatcaggaggcaaaaggctgtttgtgaatgatatgatatgttttctcaagctgagcaccttgtacttaaaattttcaggttcgctgcagttttggatagacgtgacagagtagttccaatgaatatgctgccgataaagatactcgttataatcaaatgcacccggcacagttgcgtgattcggttcttccaatgtaccagtcaactcacatgacattcctggttctatgtataacagctgttctttttcaccagcagactgaatgcgatacgcagcagcccatttttccttatcaggtgtctcaaccatcatagacatacggtcgccgtcaattttgggaatagtgtcaatcactgccttgaattgataggttccctgccgataggaagagacattctgagaatctgtgactgcatacagtacaaaaaacaatataaaagagaagaaacaaacaataatgagaaaagcgtgcctcgttttgattaaaatgatgaggagaaagaggatgaaaagaaaaatagcggggaaataagcggcggcagtaattccaaccgttgccgaagctgccgccataggcaataacaaacgcgaattacgcattcatcacacgtagctcgtgaaaagtgtattcgcctgttcatgtatctttttcaattcttcctccgctaaaccggcatcggccaatttccctattagacccgctacaaatgaaagcttttccctgtttttcagatcaacgatcatttcatcgagttcaacctgttcaactgttacacccgcctgttcaaataattcctgcgcatacggatgtgttttgtaatcctcagcataataaaccgttttgataccagcttgaataatagatttgcagcattgaatgcacggataatgcgtcacataaatctcggctccatcagtcggcaccccaaacttagagcattgaagaatcgcattcatttcagcgtgaatcgttcttgcgcaatgatcatctatcattaagcatccttcatctgcacaatgtacaccgcccgcgattgacccgttgtagcctcctgctatcatgcgtttgtctctgactatagtagcgccgacagataatctcggacatgtgctgcgcagcgccaataaatggctttgagccataaaatattgattccatgaaattcgttccacgttgttccctccaaatgttgtgttgcctgacctttagtttacctatcataatgcatgaccgtcaaatcactttactgtaatggaagactttattttctcaaatgacttttcacctattcctgaaaccttagtgatatcttcaattgtttggaaacgcccgttttcttcccggtatgcaataatagcttcagctttggatggccccacccctgagatgccttgtaactcctctaaggttgctgtattgatattcaccagcggccccttccctccatcgctttggacagaccctccggtaccttgctgcactgctgtttcctctccctttttcgggatgtacaccactgtcccgtcctgaagaacctcggccaaatttacttgcgcttcgtctgcttgtttactggtcccgcctgctttctcaattgcctgagatactctgtcccctgttcgcatttcataaacgccaggatgctgaacagcacctttgatgtctatcacaattgtttcgcttgactcgtcgttgtttgcttcctgctttaccactgtattttctgtctctgttggtacagcttgcttcaccggctctttatttttccctgtggccagaaagatcataatagctgtgaaaacagccgcagaagccgctaaaataattgttttcttatgctgattcaaccaattcatcgtgcatgttccccgctttcgtcatattttattttcataacacatatggtttagaggataatagctcaaaggaggggaaaccattgaagataggctttatcggcacaggaaatatgggtacgatccttatcgaatcatttattgaatcaaaagcggccgatccctcaaacataacaatcacaaaccgcacaattgaaaaagcgttgcacataaaaaaccgctacaacagcatcaacgttaccgaaagtctcgaaaagctcgtttctgagaacgagatgatttttatttgtgttaagccgcttgatatatatcctttactggcaagagcgttaccttatttaagaaaagatcatattctcatttcaattacaagccccgttcaaaccgaacagctcgaacaatatgtgccgtgtcaagtggcgcgagtgatcccaagtattacgaacagagcgctggcaggtgtttctctcgtcactttcggcacaagctgcgacgaatctgcaaaaacgaaaatcaatgagctaatgcagcatatctctcatccgctgcaaattgaaagtgacatcacaagggttgcatcagacatcgtaagctgcggccccgcttttatgagctatctgattcagcggtttatagatgcagctgtcacggaaacatcagtatctaaacaggacgcgattttgatgtgtaaggaaatgcttgtcggaatgggaaaactgttagaaaccgaattgtataccttgcctgcattacaggaaaaggtttgcgttaaaggcggtgtaacaggagaaggcattaaagcgctggaaagcggtgtgcagaatatgtttcaccgggtatttcaaaatactcatatgaagtacgaggaggatatttccgcagtgaaaaagcagtttcatgtgtagacgagtatgtcatactttcgtctgtactgcaaaagcataaaaaagcattttaaaaaaccatcgttttaagaaacgatggtttttgatttctgcgccttgaaaaagaggcgttctgattgtgctgatggctcggtatccgtaaaatcagctgtcacgcgatggagctgaaagccgcagttcttaagcatttcttcgtattcttccaccgggaacgttctttgctcgtgtgtctcatcaaaacgatcatacgcttctccgttccacacaaaaaacgacatatcatgaatgacagaaagctcgtcacttccggcaaagctctgccaaatatagctgatatcttcgtcctggtcagcaaatgtgctatccggaaagacttccgcaattttataagatgaatgaacatcaaacagcaaaatgccttcaggctttaatacccgaaatacacttttaaaggtttcgatcacatcattttttgtttttaaataatttaatgagtcacagcatatcacaacagcgtcaaattgaccgtcaaagccggtaatctctctcatatcctgctgaagaaataaaataggctggctactcgataccttttgctgggcgaaagaaagcatctcttcgctgagatcgatgcctgtaacctcgaagcctttttcggcaagccggatggagatttcccccgtgccgcatgccagatcgagaatacggcctttttccgggagagatgcttcaatccattttgtccattgatcgtaaggcgcgtgtgacattaactcgtcatacacgcttgcaaagccctgataaatcattgattcattccaaagtcaagatctgcgagcggagcgtctccccacagcttttcaaggttgtagtagcttctttcatccttgtggaagacatggacaattacatcgcctagatcaacgagaacccatcttgcttcatcaaagccttccatctttttgacttgaatgccgttttcatcagcttgatccttgatttcacgggcaatagcctgtacctgtttatctgaatttccgtggcagatcagaaaataatcagcaaccagagaaataccttccatatccagtgctaaaatatcctctgcccgtttatcatcgcaagccgcagctgcgatctttaaaatggacttttggttcattcacaaattcctcctgttcagctgccagacacaagccagttatacgttaaaaatgtgtctggaaaaaccggttgattttttttcataagaaaaaccattgtatttttaatggactgaatcagcgcttgattcaaatctgtctcagcaagcttacgcacctcatcgacaccgggaaatgcccggtttggctcaatgtaatcggcaacgtaaatgactttttctaaaagtgtcatgccggggcgccctgaggtatgatacctaatggcgtcaagaatgtcttcatcttgaacccctgcctctctttggaccaaataagcgccgaccggagcgtgccagagctccggattatgatccaataaatgcgcaggcattttttcacgcgcaataatttgtttcatttcttctttcgggcggaatttggcgtaatcatgaaagattgccgctgtttccgcttttttagaatcggctccaaaacgctccgcaagttcgatcgccgtgttcatcacgccaaccgtatggatatatcggtgttcggtcaattgctgcttcacgcatgcaagtgcctcctcacgattcatataaaccattctcctctacatacttcttcactttatcagggattaagtagtcagtgggcttcttgcttttaaaccgttcccttatcatagttgatgatacctcaaattccggaacgtctgcaaagagaagcggataaggggtttcaacatgaaaaccggggcgctttactccaataaattgaatgaggttcagcagctcgtccagcttataccatttcggcaaatattcaatcatatcagcgccgataataaagaacagctgatcatttggataacgctgcttcagtaaagaaacggtatcaaaggtatatgatggcccttctctttccatttcaacaagctccagcttaaaggacggattagattgaattgcaagctttagcatttccacgcgatgaaagctgtcggtatagtcttcgttctgtttatgcggcggaatttgattaggcataaaccaaatttcatcaagccccgcctggtacagcacctcattcgccattaagaggtgaccattatgcggagggtcaaacgtgcctccgaaaattccgattttcttcatttcaaccacctttaaggaagctcgatttgtttattttcctttgattccttatataacacaatcgtattgccgattgtctgcaccaattgagagcggcttccttttacaagagcttccgctacatcgtttttatcctcttcgcaattctgaagcacgctgactttaatcagctctctcgcttcaagcgcctcagtaatttgtttaatcatgttgtcgtttactccgcctttacctacttgaaaaatcggcgttaaatgatgcgcttttgaacgcaaaaaacgtttttgtttacctgttaacattctgttcctcctaattttcctattacaatagatctcattttttcaatatcaggctcttgtccagtccacaattggaaagacaatgctgcctgttcaacaaacatgcccacaccatcgagtgttttcaagcctttttggcttgcttcttttaaaagggccgtctgtattggattatacacgatatcacatacgacggcactgctcgcggcacgctgtaatgaaagcggcacatcgtccacgttcggatacatgcccacagacgttgtatggatgataacatcatactgctcaagacgttcttctgcttcttttatgcttaatacttctttattgtgaaacgagggagtagcttctgtaagccgctttgctttttctaacgtccggttgcaaatgtcaaattttttcggggtatttcggacaattgttgtaaaaatggctctcgccgctccgccagcgccgatcattaagaatgacagttcagagatgggcttgtctaataccttcattaatgacttcacgaagccttccccatcggtattgtatccgacaagcttatctccctctcttctgaccgtgtttacggcaccgagcacttttgcactctcatcaatatgatccagataatccataatggaaaccttgtgcggaacagtcacattgattccttgtacgcctagagctcttattccttttaccgcatcctccagatcattctcttctaccttgaaggcatgataatgtccgtcaagcccgaggtctttcaatgatgcgttatgaatatcaggtgacatagaatggccaatcggatttccgataaccccgtacagctttttcatactcctctccccttttcttaaattaatgaacgccgaacaaatacatgaacgccttttggcgcgtatgcagttacctttttatcggcgtcatggacagtaacccagcctaacccagagaaaacgatatctgtctttttgtcttttatcgtaaacgtatgggcgaccaattccggaaactcatccatttcatctttacccggaggtgtgagcaattcccctgcatgcttttcataaagcgcgtctgcattttcaagttttgttctatgaatcatcagttcattcggcatatagcaaataaaaggagatctttccccagacacataatcaaaccttgcaagtccgccaaaatacagtgtttgctgatcattaagctggaatgtgcgaggcttcagctcctttttaggagataatattttcagatcctttttattgacataatgcgccatttgatggttgttgataattcccggtgtatcataaagcgatgaaccgtcatccagcgggatttcaatcgcatcaagggttgtgccaggaaattgggatgttgtaataatatcttcttcacctgacacttctttaataatccggttaataaaggttgactttcctacatttgtacatccgacaacatagacgtcttttccgttgcggtaatgctcaatcgcgtcaattacttctctgattccctggccgcgtcccgcactgaccaaaaatacgtcaaccggttttaagccaagctctttcgcttcacgcttcatccattggatcagacgctctcttttcagtgacttaggcaaaatatccgctttattgccaactaataagatagggtttccccccaccaagcgctgcagcccattaatccagctgccgttaaaatcaaaaatatcaacaatttttacgacaagagagtccgtttctccaataccgtgaagaatgttcaaaaaatcatcatcagttaaggagacatcttgtatttcattatagtttttcagtctgaagcaacgctggcaaatcacattttctttcgtaagcgatgcaggcggcgcgtaccccaaacctgttttgtcctcggtttggatcgtaactccgcacccgatacaaacaaccttttccatttcttactcctcccactgaatgtgcccttttcgtttgagagcactcagtattctgcgttcgacctggcggttaaagcgcgtaatgaatccgtcagaggaagcgactggcacgaccaaaatcgtatggtagccgtttcggtttcccccgagtacatcggtcagcagctggtctccgatgacaacgcagtcctcttttttcagctccatattgcgcaccgctctattaaaggctttacccatcggttttcttgctttatagatgaatgggattccaagcggttctgagaaaagtttcactcttctttcgttattattagagacaattgtcactttaatgccgtgttccttcatttcttcaaaccactcgatcaatcgcggcgtcgcgttcggcctgtcccattcaacaagcgtattatccaggtcagtaataatcccttttacatttcgttcctttaatttctcaggtgtaatatgaaaaatattttttacaaactcgtcaggtaaaaaaaacttttttaacaaaacccgcacccttccctttttctttctttcaaaatgattgtcgaaaaaaatcgaacttgcgcctaaagaaaaactgagcaaaaaaatttcgacaaaaattgggtttcttcaccaggtgtggataaatttacacacactatccactcttattacatcactctttagacaaattataaacacgatactcacaagttatccactttttggtgtggataacagaacgattgttcttatatgcatttcatggtagattaaagataacttcaacctcagatgaacgcaacttatcattgtatgcgttaaaatcatgaatgattccaacttttaaggaggtgcctctcccattaattgggttcctagcatgagaaaactgtctgatgaattactaatagaatcttatttcaaagccaccgaaatgaatttaaaccgtgactttatcgagttaattgaaaacgaaataaaaagaagatcgctcggacatattatttccgtatcttcttaataggaatttgtctattttttccgggcgtatttcctttttttactcagatgactgatattatatcactttggctgcgcgctttactactattttcagcaaaaaacacccctaaaaagaggtgttttaaagggccggttattatgctaaccagtatatgccgcccacaacaaggagaacaacaactaaaacaacaataaaagcgtatccatatgctctgcctgcgccatacatgtgaagcgcctccttaataaggttttataacagcctatgtaggagaaataaatcggactaggcggttgtccggctcaacgctgcaggatctgcccatcttgtattccttcatatacgatccttgcccctttaggtgtcatatgatttccagaaggatctataagaccagattggataagcgcttcatcagttgcttttccgccgtctgcttctataaaatgcttccagttatctacaagagggacatccaggcgcttcgacacatctcttgtaatatcgttatatgagttgtgccatttccttgctccgccttttggttcaaaagcagctgcttgatatctggaatagtaaaacaaatgatgcttcccattaccttctataattgggatacacgtcattaagattggcttgatcccgtgttttctgctttcttcaataaaataaaccagattttctctaaaacgctgcttcgacactctcggtttcccctcagtcagtatggcagcgtcattggtgccgaacataataaacaaatacttcggtttttgatccagcacatctgtctgaaatcggagacgggcatcctctgtcgtctgtccgccgattcccgcattgagtatatcaaggttaccgcgctcagctgtttttaatatattgacccactgctgtgcttttggataatcgcgataatcccaattagagccacgcgtattgctgtcaccaaatgctacaacgtcttcgtatccccttccctcgcatcctgctgtaacgaacagcagaaggaaaaggatgataaaatgtttcatctttacacccccaaaagcctcaccttaatgttatacctctgtttctcttcgttcaatgaagagtttttcgctatcactgttttttcctatagttaacgtgtccccctcagtgaatatcattctgctttcattgcggcgcagctgatgattttttaaaattcccttctttccaatctgaaaaacacacaaaccaaagaaaagaaaataacctaaatccgcactggaaacaggttatccgttaaatcctgcatttactttaacttcgatttaagcttggcctttgtttttggcccataaatcccgtctgcagttaatccgttcatgagctgaaaacgcttgacggcattcgctgttttcggtccgtaaactccatctatgccattgtttttggctcccttatcagggtaaaagtgaagtgcagttaaagccttttgcagctggagaatgtttgtgccctttcgataaggcgaagtgagctttataaccccagacggcagaggatatgatggtaaaggttcttttggaggtgtatccgaggaagaaattccgtttataaaagagttccagtggttcaagagtttccgcggacattctttcccagaccattttttgtggggaacaacacgatgtaacggaatattgttttccttcatcagctttctgatcagccactgggcatttgatgttgctttttcaaaatcgccatcagcattttcgcagatttcaatcccgatcgatttgcggtttcctgtcccgtttgtaccgtctcccgcatgccagccgttttcatctatcgggagatgctgataaatgactgaatcgtcaactgtaaaatgccagctttcggatgtgctcgggttttttacaaaattggcgtgcattttcgcatcagcgccttttgctgtattcgctgtattatgcaccgtaatataagcaggcgtcatcgcatagccaggacgattatcatttgataccggtataaaatccttttttatggttaccatttctatccctccctattattaagaatgcagaaaacagagagatggacagccttttttatgaggtaaaaaagaattgtgttctcaacctggttttcagttgaaccgctgaaatggcaccagttatactaatttagatgacggaggttttggctcctgacatcacctaagttgggagtgaccatagacatgttaaaaaaagtaataggtatacttgtgattatcgctatcattgcagtcggtttttttcagaaagaagcttggcttgatgcaatcaaagcaggagggatgttttccgttttatttagtatgctgctgattgctgccgatgtttttttcccaatagtgccgtttgctttggttgctgctttaaatggcgcagtgttcgggactgcaaatggaatttggattacactgaccggctcaatgcttggtacaatattgctgttttttctcgccaggtacagttttagagattgggccagaaaaaaagttcaggcctatcctgccatacaaagctacgaggcttccttcaacaaaaacgcttttaccgctgttttattaggaaggctgatacctgtcataccttcacttgtaatgaacgtgatctgcgggctgagccaggttcgctggcatgtttttttctttgcgtctttaatagggaaaatccccaatattgttgttgtcactattgcaggtgccaatttcaccagcaataaattattgtctatcagcatttacggtgcatatattctgatcatcatgctggtcatttataaaaagttccctcatcttctgaaggtgccaaaaaaataaggaggcttgttggcccccttactttttttctgtcgcatggcctccaaattcatttcgaagcgcagcgaccacctttcctgtaaacgtatcgtctgttaaagaacggtatctcatcatcagtgacatggcgatgaccggagttgccgtctgcagatcaagcgcggtttccaccgtccattttccttcacctgaggaatgcataatgcccttgatctgatccagtttcgcatccttagcgaaagctcgctcagtcagtcccataagccaagaacgaatgacagaaccatgattccacactctggcaaccttctcgtagtcaaaatcaaattggctgttttcaagcacttcgaatccttcaccaatcgcggccatcattccatactcaattccattatggatcatttttaaaaaatgtccgcttcccgcttcaccagcgtatagataaccattttcgacggcagtatcacgaaaaagcggttccacaatctcccatgcttcatgatcgcccccaccataaaacaggctccatgccgtgcgccttccattccgcccgacgttccggcatcgagataatggatacccgcttctttcatttgattgtagcggcgaattgattctttataatgagagtttccagcttcgataatcatatcgcctttacttaataaaggtgatacatcacgcaaaacagcatcgacaatgccatgcggtaccataacccataggatacgcggcgggtctaataaagaaattaactctttaagattcgttgtcccctcagccccgtatgctttcagttcatcaacagccgcttgatttacatcatatccaaccgcttgatgattgcggtcaatgaattgctttcctatgtttatgcccattttccctaagccgattaatccaattttcatatctgttcctcctgattgtctaaaaagcctttactctttatgttccctttggattgtattgtgatacgcagaaaacaaatggggcttacatcgtctgcgcatgtaaattttatttttcatgactgactgtgcctgccagttctattactgaatctctttatatccataattatcactttatccttgatttaccatcagtttaagttaaaatatgggaaggtattcgatttttttagtaaaaagaaggtgacatgttgcagaatcaatctcatactcttatcggagttacgaaaaccgctgtattctttttatacgctgcacttgcaatcatcggttttgcaatcgggtattttattccgcagattgcgaaatgggcattatccctcccctggatccctcttgaaggaccacttcggctcattacctcttttcagggatctacagcttcatttatcactgctcttctcggtatgtgtgcggggatttggttcgctcattctgttattgcaatgctgctgtctgtcaaaattacagatcacacagtggaattcatcaaaggaaaaaaagtgcaaacaattcattccgatgacatcgctcttgtatttatggatcacaaacggcttgtcctcctgggaacagccggatatgaattggtacgggaagaaattgatgaaaaaccagtaaacgttgagaaggcctttagacagcatcattacgaatgggcaacagatggtgatccgtttaaagatcaatttcgccgatggattcctgatgcaccagacctatcgcaaggcgcccatgccttattaaaagctcgtcacaaagcactgcaggacgaagaaaaagacgatattgaagaattccgtctcgaactggcacagctgggcatcgttgtacgggacgaaggcacacgccaatattggcgaaaagcagaaacctatcccccgaaaattcagctcggcgaaggattgtaacaacagaggctcaagaaagagcctcttctttattactgcacaataaacagcactctggtgccgtcagggtagctgctcatttgattccctacccacgagccggcgccgcgattatcagaaggcgtcacatatcggacatcagcccctgcaccgccttcctcgcagaccgccatcggccactcatcccggtcatagcccggcttggtcgggattccctttaaagattcctcccgccttttgtctgctccatctctgtcaatggtacaaatatctggatgtccctctgcaatcgcatccctaatatgactgccggtttccggataacgagacagcggaaaatataacactttgtcatacgaagatgcgccttggatctgttgcggaaccattaaacaaagaagaactgctgcagcaagaaacaggcctgccatccattttttcattcccatccccccatacctttgttcatttcaatgtatgggcgcttgatgaagaatatttttaacatttgaagttagtatgctgcttaccaaagccggactcccccgcgagaaatttcccggtacagacacagacagcctcccggtcacatacatttacatataggcttttgcctacatacttttgtggaggtgacgatggtgacaggtgttttcgcagcgctcggctttgttgttaaagagcttgtctttttagtatcttacgtgaaaaacaatgcctttccacaaccgctctcaagcagcgaagaaaaaaaatacttagagctcatggctaaaggggatgaacatgccagaaacatgctgattgagcataatcttcgcttggtcgcccatattgtgaaaaaatttgaaaatacaggtgaggatgcagaggacttaatctccatcggaacgatcgggctgataaaaggaattgaaagctattccgctggtaaagggacaaagctggcgacgtatgctgcgaggtgtattgaaaatgagattgtaattacaaaagggggtgcatactcctctttaatacgtttaaatatattcggtgatctcttctcctctcttggtttattattgaaacggaaacaaaaatccattacactattgctgatgcaccaacgggtgggaggactcgccatgaacaaaaaagaactgctcctaatgaatttcaaggacttgtttaacaagatggcttggcttaataagccaaagatggaagtctgtcttaaagggtataagccttctgaagtacattgtatagaatccattgaacatggaaatactaatgtgacaaaactagctgagtccctttatatgacgagggggccataagtaaaatgactaaaaagcttatagaaaaaggcttaattgaaagctaccagaagccagataacaagaaagaaattcattttaggcttaccgagcaagggaaaaaaatttataaaatccatgatgaactgcacaaagagtttctagagcgcgacaaggcagtatttgaacaagtaaccgaggaacaatttgactttatgattaactttgcggaaaagtataatagacatttggatgtagaaataaaaaaacaaggttttgatattaagtcggaataaatttaaataatgaaaatgcaaccacaggcagccaactctattgagtttcggctgcctttttattaccgtcattttgttgacgaggaaacaaaattatgttattttttgttgactgggaaacaaaaaatacaacttttgagaggtgaataatatgttaaaagacaaagtaaaggagccaggattaccaaaagaaatcctcatggcttcctgggccattgcacttggagcaattgccccaatgcttgactcaactatggtgaacattgccatcgacaaattaaataaggatttcagtacgacgttggataccattcaatggtccattacaggttatgttttagctcttgctattgcagttccagtatccggatggcttatgaacaaatttaatggaaagaaaatcttaatcggcgcagtcattgcctttggtgtaacttctgtttttgctggaattagttgggatgtttctagctttatcttattccgtttgcttcaaggatttagcgctgggattattactccgctcatgtcaacactcttggttaaaacagcaggtccagagaatataggaaaagttatggctatcgtcagcacacctatgattttgggcccaatcttaggacctgtaatcgggggcttcatcgttcaagctacatcatggcattggattttcttcatcaacgtgttcatcgttttgattgctgcaccactgatgatgaaaactcttccagactttgagccattcaacaaaaatagtaaacttgatatttttggaattatcaatctatccttaatgagtgcagcaatgatatacggaattacaaaagcagcagaccatgcatcatttaacaatagcgaaacaatcctatgggtgggcatcggcctctctttagctgtaatttacatcgtatataatcgaatcagaaaaaatcaaaccgtactccctttaaatttgtttgcacacaagaacttcttagcatccagcgtcgggttattattagcgaatattgccgtcatgggacccatgttaatacttccattgttctttcaaaacttccgtcatttcacggcaatcgaagctgcgcttgcattaatccctcaaggagttgggatgctcgttactcggccaatgattggaaaaatgattgataagatcggtgcaaaatacgtggttattgtcagtctcgtcctttcgcttatcggatctattccgcttatctttatcaccgataaaacaagtatgatttggatttctatcatattattcatccgcgggaccagttttggaggaattatgcttccgttaacaagtgatgcttatacaggacttgacagcaaacaacttccagaagcaggtgtcggtattaatattattgaaaacctcggtgcaagttttggttcagctgttatcgcaactgttgtcgcaactactatacaaggattgcaaccaacgattgcgaatggcttaaaaggttaccatgccggattcttagtatccaccattgtccttgcggtaatcttcatcccaagtctatttctcacacataaaaagaatgcacaataaagaaatctgcatactcgactgccgaacggtttgtttggataacttgtgatacatgtgatgtgcaccagtttcataagcccatttagaaaggcgcttactaatttgattggctatctgttttcttcgatgtctggatctacttcagaggtttcaattacaaaaagagggcaataaccctctttaatacgtttcaatatatatagtgtcagaatccacaacggtaacttctttcacgataaagttaacaattgtttttttatcatcaagggttaagttatctgcaccgattgattgaaaatagtcgatggctctttttagagcattttcacttgagctcgtatcatccaggactttcatttttgattgaatttcgctacacttttcagtaagctggttttgctttttttgcagctcaataatttgcgctttgatttcatctatgtctaaatcatcgtcatcgcttaggctgattagcgttaaaagacgcttgcggcctttttttgttttctctatctctttttgaataagttctaattcatcagacaggtgatttgattgttcaatctctttgaaagaagcatacttttgaggatttgtgatgaatttaaaaatttcaccccatacatgccggttcaatttattctcagacatttcctttccgcagccgcggtcctttgcgccagaataatttttccggcaagtatatacatagtagtctttaccatgtgattttcttttcttccctgtcatggtatttccgcatttcccgcatctaaccaaacccgataacaagtaattgtgagggctaatgcttaagtgttttcttttactttgacctaagagttcttgagcataatcccattgttcagctggaacaattgctggaattgccacagtgatttgctcctcttcaggccttattttgattatagatttgttccctgcctgttttgaaacataggaaccctctgtatcatatttatactgtttatgttcacccttataagaagagttcattaatatctgtcgaacaacctgcctgtgccatactttggcacctttttttgttttaacccccatctgagttaaatgtagagcaataccatttactctgccgaaaaaagggcttttatgatcggtgaaatagttaaaaatcatcctaatgatttttgcttcctcttcaaaaatctcaagagttcttttctctttaacaaatttatagccatatagtttggaatctttaataatcatgccttttttcattttttgaagtcggccgcttgatgtccgttctttgattttggctttttcaaattctgagattgctccacgcattgcgaaaaataattgaccttctggagaattggcgtattcaccatttacaaataccaagggtatatttcgctttcgcaattcgtcatcaatgataagctgattcattaatttccgagaaagacggtcaggatcataacaaatgacttgacttataagtcccttgcttgcatcctccctcaagcgattcaaagccggacgttctaaaagctccccagaaaatccttcatcggcatacttcagcacatccttagtccctgctttctttatacaggcctcgatctggctgtcgatgctcgatcccttgatcgcttgttcctcggtcgatacccttacatatattgctatcaccctggatctccttcctataaagttttattaaataatgatagcaatcgttaatgcatttgtcagcttgcggtccctcgatgattatcaccttcataaaatgcatcaccccttgggtaatgctatgtaaaggcggtttgtcctaatgaaatcattttcaatgagtgtgaaaaaagcacttaaaaaaccgatagttaaaacgatcggtttttcgacatcgcctaggccctcaacatagtaaattcatatcattagttatgaaagcttattttcactacactccttatatttaattgccatcatttctatacgatttatatgaaatatggtaaaaaatggttagctaaaacgataaagataccaacctgttcatttggtatccccattcttcaagtacctcaataaatgtaaaccactgaatatttttatgacattgcacgtgtcaatgatgccaattcatgaactcataaaggagatttaataaaactcccaaaacaaaagggatatcaatatagttggtatcttctttattagtttgaatccctcaataaagtggatgcttatcataattacaaaaaactttatttgaagcactgaagtcattcattatattgttgtaaagataacactatagtccccttcttacttcataaacggttgttatatttaacttcttaattaagggacattttctgtttttagattcgttatgtctttttctgttacgtaaagaatggagataaaccaatagaattaagtgagctttaaatgcttcaaaaagctctgataacaaatctctttataatattcatgtgaatttatatcttcactcattagccattgaatgagcaatccatctacaatagatcgcattgtttttgaagctttttcaacatctatactttggtcaaatacgcctgtttcctgtccgaaaataataatgttagatgtggtgccccagcactgttgataaaagctatggttaattttcctgtacgtttcatttcgggttgcctgagacaagaaatctaaataaaccttataaaacttttcattttcctcgggagagacaaatattgaatttacataagctttcaacttatctagtggcgtagattccgaatccactgcttccaattcatgtttataaattttatttgtaagccactcaagtagttgagaaagggtatcttccttattatcaaagtaataatgcacgacgcccttactaactcctgcgtgatctgcaatactttgtagtgtaactgaattataaccttgtgttgacacagcttggaaagctgcccttaatatctgattctttctttcttctgcttttttcttcataataaacctccagaaagctaaaccttcaattagtatacaacagttcatgaaatccacacaaaattattccgaccagacaaaatagtttgaccggtcagaataatttagtatactaaaagtggtttcacatcaagatagcatataggaggatttataaaatgaaagacgaattcaaggctctagttgtaaacaaagttgatgatgaattttcaattaaagtaaagaatgtttctccagcgtttttaccagaaagtgatgtccacatccaagtacactactctggaattaactacaaagatggacttgcagggaaccccaatgggaaaatcgtaagaaaatacccatttataccgggtatagatttagcaggtgtagtcatttcttctaatgatcctcgctttaaagagggggataaggtgattgccacaagttatgatataggtgtttctcattttggcggttttagcgaatatgcaagtctccctggagactggattgtacctttacctgataatttgaccctcaaagaagcaatgatagtaggaacagctggcttcacagcggcactatctattcaacgtctagaagaaaataacctatctcccgaaaaaggaaaagttctggtaacaggagcaacaggtggcgttggtagttttgctgtttcattccttaactctctcggttatcaagtagaagctagtacaggtaaagaatcagaatatgattacttacgaaaacttggagctagtacaattatttcacgggatatgacctatggagggaaggttaaagccttaggatcacaaaaatgggcggcagctgttgatcctgtaggcggggaacctcttgcctctatcttaagccaaattcaatatggaggttccgttgctgttagtggattaacagctggaacaaaactgccaactactgtttttccattcatcttaagaggtgttaatttacttggaattgattctgtatattgtccaatggaaacacggttaaaaacatgggatcgtgtagcaacagattttaaaccatctaatttaaaggaatttatatcacaagaaattactttagatcaacttcctaacgttcttcctgaaatattggaaggacaagtaagagggagaacgattgtaaatatcgtatgattattcatcagaactcatccagttgctaaagatgaaacaatgtcttaaaggtctagtaaagggattctcaacaggaattcctttacttattatagcttactttatgttaatgcaaaaatataaggagtgatcctccccattcagcttacacagtcttaatgatatgaaaacgcttattcatcgtacattataaatgtggctcctagtctggagtttcgttatgggcaaacaaaactcaaataaataggaacccaccttgtcacaataaactcaatagactaatgctgagaagtctccttacttacttcaacatgctcaaaaccctgtaaacaggttcccttggggagaagaaacatttgaaaaagcgaaacgcgaaaacaaacctgttctcgtatctattgggtatagctagctcgggtagctatacgcacatgtcattggtgccatgtttcttaaaataaccacaaaaggcaaccagtttcggctgccttttaataattttattggaaatttttagaaagctagattcaaaaactttttctcttctaatttaaatactgttgttttttcttttgattcattccattttatcttgccctctaatttgtgtcacttaatatcttcctcgggcatataatcaaaagttgaaacgtgattggtttttttcccaccgtctacaaaccgcgagttctgctgattaagaaatggaaagataaaaagctagatcaaatcatagaaacaccttattattgcctttcaaaatcctctgcataaatgaactcaactttttgactgctctcttcgtattccccttaaaatttaataatcactttcccttttggccgtccatttgcgactagttctagcgcttcatttacgttgtctatggtaaatagtgttggatgaattgctggaacaatgttgttttcttcaatgattttagtaatctctttaagttgtgcaccgtcagaacgaacgaagataaaatagtatcctacgttttgtttcttggctttgcgatcatactttgcgcccgcaagggaaaatagcatttgtttccacaatggaaaatttcggtcttttccgaagcgtttatttggtcctgtacggagagagagcaatcttccgcccgatttgatgatactcaattcactgtcaaattctttaggtcccagtgtatcaatcacgtaatccacattcgacaacaagtcaacatagttttctgttgtataatccaaatattggtctgcacccatttccaaagtgcgttcgcgcgcctctgagctgccgctaacaatgacatttaggcccattgcctttgcgattggtacagccatttgaccaaagctgcctgatccacctggaatgaagacagatttacctggctgtgcctcaagttcttcatgcaggccttgatacgctgtgagtccagccagtggtgcagcagcggcttccacgtaagacaaattttttggcatgggtgcaattgcggcagcgtcaattgcggcatattccgcaaaagcaccaattttttcgagggggagacgtgtatagatggcatctcctacgtgaaattctgttacattttttccgactttttcgataactcctgtcaattcattaccaagcgttaatgggaattcataatcttgaatcagtttcacgctgcctgtaattattaacatttctagtggattgactgccgcagctttgacctttaccaagacttcgttttcatcgatttctggaattggaatgtcattgactttggcatggatattttttgaatacttggtgatctgagctgctttcatgagtgttttcatatttttatcagcatcctctatcatattacatttattaggtttttacctttttatataatcgtttaggtggaggggaatcttactttaagcgaagtctgacttccaattttatgattaacccgccacctaaacattcgtgatttttagaacgatcattctcaaatgattaaattttttaggtccgatactgtaaataaatgtttctcatcttcctagtgttattgatatagaacatcgttattatatagatttaataacttgaaagattacatctctagaatcggatagatttgatctcttaattgaaattcatagttttcgtctacaattcctactacttgattactatcataaagctccatcataaaactcgccacttgctcaactgtgtggtacatcgggatatttgctttgtaatcaaattctgtcgtatcagatgcatttttcatgaattctgtttccgtgattgctggtgctaaaactttcaccttcattttcgcacctttgcgttccagttcttttgcaagcccttctgtaaatgcactaacaaagtatttagatgcagaataagtaatactgccaacagcaattgcatatccgagggctgatgatacgttaattaactgagttccctctacatccgaataatcacgtacaaatagtgtagaaagaattgttaaggattctacgttgacacgtaacatggtttccactttatctaaattctgatccgtgacagaagaagattcaccaagcccggcattattaatccaagtctcaatttgatattcctttaaattatcatacagtgtgtatgcctgagctgtgacagataagtcacatgtacgaatcataacatccaaatcgggattaatattctgaattgttgatttaagctcttctaatttatctaatcttctagctacaataattaagtttttgccgcgagcagctaacgctaatgctgtctcatatcctatacctgagcttgctcctgtaataactgtatacttcatattattctctcctcgaaaacaaatttttttttattagatcatccatataacaaaatagattcagtctaatgtcgacaaagtcaaatcaataatgttttctaatttttcctcatcatttgtcgtttttgctaatactcgtatccctacgagtgaattatgaataaattgagaaagccctttgatatcatagtgtttagaaatttctccttgttcttgaccatgtttcagtagatcaaataagaaggtttctgtctttataaaagtctctgtaacttttttagtaaacgatttattccattacgagatcttggctagatgacagatcataatcaactgccactacactcctggtcaccctcaattaggtcaatgccctgttctttgctgtgtggatctgaccatacgggtcaccattttgcgcggcatcaaccgtggaaggaatgccatgaatcggtttcgagccccgggcattattaacgtcttgccacgtaagaagcctcggtacccttcctcagccacctgcccggcctccatgatagcaccactctggaacaacttcgattcaccaatacccgaacgatcaacgaagccggttgacgtcagtcccggacatagagccgtcacagtcacccctgtaccgctcagttcgttctccaaagcctcggtgaacgacagcacgtacgccttcgttgcgtagtaaaccgacatcataggtcccgggaagaaagccaccaacgaagccacattcatcacgcctccttggccccgtttgaccatatccggcaagaacagtttcgtcataacagtcagagccttgatattgacgtcaatcatattcgtctcttgttctaactgcgtctccaagaacgtcccgtacaaaccgaagccggcattattgacaagatagtcgacgacgatccccttctccttgagctccgcaaaaatctcctccggcacaccgggtgacgccacatccttggcgatgaccgtcgcttgactgccatatcttttccgatattccttcgcgagctccaaaagcttaccctcgctacgcgccaccagcaccaaattatatcctcccttggcgaaacgatccgccaactctttgccaatcccacccgataccccggtgataagaacagtttttttcatttgacagcacacctccatttttagtttgaacttttaaaacgttttacagcgtttcttactgcgagtttttactatggatgtatgttatccataattcaaatttttgtatcaagaggatttatacttgccgcatatatctcaactaagacctcgccattatttattttgggcctagggaagtaaaaatttggtttttcgccgtagttttcaatcgctaaagctttcgttacaatcctccacatttttatttaacgcacatgtatcttttcctaacgaacctaagaaaaaagaatatgaatatcccttccctagatgggatattcatattaaataaattattttaagaaaggataatctgtataaccttcttttcctcctgcatagagcgtgttttgatcaggttcgtttaggggagcacctgatttaatccgttctgcaaagtctggattagctagtacccaagtgcctactgtgacaacatctgcaagattattatctacatcagacgaaagttgatctagaggacgacctggacggttaacaagaagtgcttgatcccaaagttgacgcacatcttttaggaattgctcgtttccaaagtgcattaaatgcagatatacaaggttaagcttatttaattcacttattaaatagcgatacatctcaaggctattttccccttcatcaatgccttgcagtgttccttgaggagaaaaacggatgcctgttctttctgctcctatttcatcaacaactgctttagctacttcaattgcgaatcgagaacgcccctcaatcgtaccaccgtatgcatcttgacgatgattggagttttcactaaggaattgttggatcagataaccattcgctccgtgaatttcaactccgtctgcaccagcttcaattgctgaacgtgctgctaaacgaaactcattgataacatcttttatctcaagctcactcagttctcttggtgttgggacttctttcattccttctgccgtgaaaatttctacaccaggtgcaatagctgacggtgcaactgcttggcggtggtgaggtgtgttatcagggtgtgatatacgtcccacatgcataagctgaataaaaatatgaccgccttcactatgaactttagaagttacttttttccaccctctaatatgattttctgtataaataccaggtgtattagtgtaaccttgcccatcatctgaaggttgggttccttcgcttataattaaaccgactgaagcacgctgaccatagtactctgctactaaatcgctcggcgtaccatctggtaaagctctatttctagtcatcggagccatacctatacgatttttcaagtcaatgtttccaatacgaactttttcaaataatctgctcatatgaatactcctttttaataaaaattagaatcaagaaataaatttacgtgttctgcaaatagttctggaaattgaaacagatgcccgtgaccagaatcaggatatataatcagctgtgctttgggtaatttctctgctaagatgtaactgtttttagttggtaccattacatcattaacaccattagtaacaagtacagggtgtttgatgttttgtaaccattcataatcatgattagatttttgtttagcccattttgcaatggcttgtaattgtgcctcttttacttgttctgaactgtttacttttttctgattaaaaattctttgtagtgaagccattcctgcagatttacttgtttcggtttgtgcgtagaaaaagaacataaaatcatttattccatcttcttccgttccgccgtgacgattcattctttcaaaaatctctggatttggattaataccagattcaggcgaagtacctgccataataatttttcttactaaatctccttcttgtaaagctagctcttgtgcaaccataccaccaatggaaaaaccaagaatgtcaacttgttctaatccaagagcttttataaatgttgctgtatcttttgccatatcagtaattgtagtaggcgttattccatctgtctcaccaacccctttattgtcaaataagattactgggcgtttatttgcaatcggttcaagcatgtctggatcccagttttccatcgttcctctaaagtgaacaagaaatactagcggtataccatcttgtgtaccaaattttctatatgcgtaacgagttccatctgcttcaataaattctgattctgatggtattttaaagtttgtcatttttgtgttcctccttagaaattaaaaaacgattttataagtatgcattatgatggtttgtttcatgctaattttagaatgaacgttctaaatagggtaaaaaaaagaaagctagtccaacactgaaagtgctagagtaatgatgccttctaattcttttttactgtaattagtttttattagtactcttatacctaccaaattgttgtgtaagaaacgagatatgttatcagaatcgatttcttttgatatctctccactagtttggccccgttttataaggttattaaacatatcttcagtacggttaaacatttttgtaactatgcgtccaatttctttgtccaacaaagataattcaatggctgcatttactgatagacaaccttttgggtattgttcaatggaattcagtacgaaaataaaaacatcacgtatcgcctgtttaatggatgaagttctgctaattatgctttccatctcattgacgacgagctcttcatagtgattaagggaagctaaaaacaatgaacgcttgtcaccaaatgtgtcatatatactcctgcggtgtatccccatatgatttaccaaatcttgcatggatgttttttcataaccctgttcccagaaaagctccattgcttttcttaatactgctttttcgtcaaactctttacttctagccatttttttctccttaaaaaaatcaatgaaccaatactaacaaaaacaaaagtcataatccattgtagaatgaacattctaaaatgaactcatgaatttcaaaccatgattaaataatatcctttttagaacgataagtaaagaattataaatttaattatcaataatctctggaacaatgtgcattctcatttgagtagcaaaacagttagatctaacgtgtttcaagtatagcaaatttgagaacgatcggtaaagaatttataattaatcatgtgttttatatggctatgcgtagcctgaatttttatgaatatcgttccattttatctctactcaaatcagttctgcaatgtcactggtggcataggatcttttttatattagatgcacacaacaacttcatccaaatacaaaaaacgaatgggaactatatactagttgtttttttatttacagtctaaacaaagtaaaggaagtattacttgaataacttcttttctccaaacgatagctagccttggcctattctaaagaacattgtcatttttgcaaattaggaaactaatttatcatagctagccttcaattaaacgttttaacttaaactcagtttcagtatcctcaactggagtatagacgctgcatcttaaatcagtatccccatgcacttgtaatgaagtaagattaaacaacattttacctaccttagcatgacgaaactcaattaatacttcaggagcagagcttatctcattttcgttccaaattttacgaaactcaggatatgcctgttccatttcttgtataaattgctcataccagtcgtcagccacatactgtccataatacgttctaaatattgcgatatatcctctaacaaaatgctcccaattcactgctaaacttttaaattcctttcttgcgaataataagcgtattatattcctttctgccgggatgatttgttcaaaatccaaaaatacattagctgctgcttgattccatccaacaatctgacttcttctatctgatataatcgttgggcaataacgcagttcctgcaaaatttttactaaagccgggctgatttccttctcattctcatttctaaaaggttgtttcactccttcctctaatgctagagcatacaaatatctcctttcatcgttatttaattgtaatgctctagaaatagcatctaataccgaagtagatacttttatatctctaccttgttccaaccatgtataccatgtaagacttacaccagctaattgagccacttcttctcttcttaatcctggtgttcttctgcgggttcctacaggtaaaccaaccatttgaggagtaattttcgaacgttggttctttagaaattctgataaagcttgaagtcttgtttcaggtttcattaagatctccctttaaaatagtattaattatactaggataaacaacaacttgtaataggataacacaatagctaaagttaataaaaacaaggagggaattatcatgaaaagagttgtcattactggaatgggagttatttctccactaggaaatgatgtaaatagcttttggaatcaactagttaaaggacactcgggaatatctctaattgattcttttgatactgctttttataaaacaaagatagctggaatcgttcgtgatttcgatgcagatgaaatattggggagaaaagaagcaaaacgattagatcgttttagtcagtttgccttagcagcagccgaacaagcattagaacattcacaattacagttagataaggttgatcttgaacgtttaggggtatatgttggttcaggaatcggaggcatacaatcgcttgttgataatgtgaatgtattgaataaacgaggtcccgcgagagtaagccctagccttgtaccaatgatgatttcaaatgcagctgcggcccaaataagcataaaattaggagcacaaggaccatcattatcaccagtcacagcctgttcaatcgggaacacctctattggtgaagctttcaatgctatccgaaatgatgaagcagatattatatttgccggtggagcagaagctgcaatcacacagatttctttggctagttttggaaacgcccatgcactatctacaagaaaccaagatccaagtcgggccagccgtccgttcgatacagatagagatggctttgttatgagtgaaggcgcaggtatcttagtattagaatcattagaaaacgctattcttagagatgcgccgatattatgtgaagtagtggggtacggagctagttcagatgctcatcatatggtagcatcacacccagaaggtaagggtgcctacttggcaatgaaaaaggcattgagaagtgcaaatatatcaacaggtgaaattgatgttattagtgctcatgcaacaagtacacaggtaggtgatcgttcagaagttctagctattaagaaattgtttggtgaacattcccgcaaaattccaacaactgcaaacaaatccatgactggtcacatgcttggtgctgctggcggagtagaagcaattgctttagtggaaagtttgagacgaggaattattccgccaactattaatgtagagaagcaagatccagattgcaacttagatgttgtatcagaagcaagacaccttccattgaaatatgggctatcaaattcttttggttttggaggacataattcagcaatcttgttaaagcattacgattgaagacccatctttatagttcaaaggtgaaataatgaatctatcaagggtttatagcccttgattttcattatggaatacctcacagacaaatgatgacgggcctcagctatctggtatattaaatagaggaaagagaatacttaaaaaaacatttagaaagaaggtgatcccatgccaaataaaagtaaccccaatagattaatcaatgagaaatcaccatacttactccaacatgcccaaaaccccgtagactggtatccctggggaaaagaagccttcgaaaaagcaaaacgtgaaaacaagccggttcttgtcagcatcggctattcaacctgtcattggtgtcaagttcgtatagctacacattatttaaaaaaggacacatataaatatgcatccttacctttttattaacagcaagagttcgttgtactatcacttggtggtgttacacaacaagaggaggaatcttgtttttgattctcgctgttcgatttggtatagaaaaattcccattcattcctatttgggtcagtaatccaaaatttatcttggactgcataacaacaagttgtatccatttcttcacgtgcaaaaacccctctttttcaagcctttccttgtgtttcaaaacttcttccaaactatctacttggaatccaaaatgattcacttgatttcccgtcacctcgtctacgacatttaaagtgaagttcaatccaggagtctctaatagaaacttagcatagtctgtttttactttcacagcctttactccaaatactttttcataaaaatcgatcgatttctccaaactgacaacgttaacccctacatgaacatatttcattttaattccccctctaatatattaatcaaaaaaatttgatttaatgactaaaaattttttagcaacaatctccttcacctttttttctaaatacacaacaaagctcttctgataataaactatttacttcctcatcatttaaatcataatagctccatgttccctttgtctctttcgttattaagttggcatctaataaaattttaagatgataagaaagtttagattgtgttacctcaaaaatctcagtcagatcacaaacacaggtttttcccctttgacaaagttcatacatgatctctaatcgtttctgatcagcaagagccttaaatttttgttcatatttccgaagtagttctgatttcgtctcatccattcatatcgccttctttaatcaattttttttgattaattatgaaacccactaaaagctagtgtaaccagatagaggttttctatttttaatattttcctccatcgctactacaacaaggttacaacttgcttttggtggcaagtcatgaacacctaaaggagaggagatttaattaatctaaagcaaaaaatacaccaatatgatttggtatcttcatctaaatcgagtccctcaacatagtaaatcttcatctacaaaatactttcattacttaacatatatttaagttccttaatacgcaaaaaagttattgcggtctcaccgaaaatttaaattgcggtgccctattgcctttttctgcgaaagaaaacttgttaatatttacattactagtagagttaagggaagggtgaatatcttgatatcaatcacatcagctgaagtgggaatgaagattaatgaatggcataggcatattcaaaaattcaatgttacggatgctgaaatgttaaaggctgaaatagaacgtgatatagaggttatggaagaagatcaagacttgcttatttattatcaactaatggcctttcgacataaaatcatgctggagtatactctgccatctgatgaaaatcgaattgaactttcagaatatttaaagaaaatcgaagggcataagaagaagctagacaatatgcgagcgtattattataacttcttccgcgggatgtatgagtttagaaacggtgaatacacaaaggccattacatattacaaaaaagctgaacgcaaaattccaacgatctccgacaagattgaaaaagctgagttttattttaagttatccgaagtctattatcatatgaaaatgactcacatctcaatgcactacgctgaactttcatacaacatctataaaaaacatgaactttattctgttcggcgtattcagtgccattttgttattgctggcaactacgatgaccttgaaaatcatgaaaaagctctcccccaccttcaagaagctttaaaaggtgccgagctgcttaaaagtaaaaatactcacatctacgccacagcatttttcaatctcggtaactgctatcacaaaatggacaacttaaataaagctgcacgttatatcgagcaggccttggttcaatacagaaaaataaactctgacgtacttccgcaagcttatcacgacctagcgttgatttattttaaacaaggcaaaaaagaacaagcaatggattgcttccgcaaaggaatcagaagtgctgtagattttaaagacgaactttttatgaacttatttgaagcattagacgttctttatataagaaatggcgatacacctaaactcctcaacattttttctcgtttagagaacggcaaaggatacccttatctggaagagctggcattgttaggaggcaaccttttcgattataatggaaaaatagaggatagtatcatctgtttcaagaagatggtatatgctcaaaagcaaatatcgaaaggggaatgcatgtatgaaatctaaattgtttatcagtttatccgccgttttaattggacttgcctttttcggatctatgtctaatggcgaaatgaaggaagcatcccggaatgtaactctagcacctactcatgaattccttgtttgattcgataaacaacattagttctgattccctttagccgtttcataacggctttttcttattttagacatgaaaagcatttcacaaaagctggtcaaacccaaaaactagaactagatcaaaagacacagatcgaatgattcatttccaccctttgatccacataatacttagtttcatcattcttccatggtaatattttgttatataattaaatgagagggtatgaatatgaaagtctttgaagctaaaacacttatgtctgaagctacagaccgcgccaaagaatataaagaactaaggacgcaaatggtcaacttgagaaaagctttacaaagcgtcgctgaactggacgacagcgagttctcaggtaaaggcgctaataacattaaagcattctatcacgatcatgttggtgtcactgatcaatggatcgactacattgacatgaaaatcgcattctttaacagcattgccggagctgtcgaggacaagggcctctctgatgcttatattgaagagtcttttttagaacatgaactggctaacgcccataaaaaatcaaaatccatcatgtctgaacagaaaaaagccatgaaagatatcctaaacgatattgacgacatccttccgctcgacctattttcaacagaaaccttcaaggatgagcttgcagatgccaatgacaaacgcaaaaaaacaattgaaaaactaggtgatcttgacgaagatttactgacagaatatgctatgtcagaaccaaatgaacaattcatcaagtcagacttccaaaagctccaagaagcaacgggcaaaggcaaaaacgctactcccattcactacaacgccaaggcgtaccgtgagagtgatatacataagaaaaaaggcgatattgagaagcgaacggaagcttatttgacgattaagaaagaggaagcgaaggaacgcgagataaaagacttaaagaaaaagcttgcgaatggtgtctcagatccggatgagtatttagaaattgcgaagaagatcgggtatgagaaccttgaacctgcacagttacagtatgtggtgcagctagaacaagcaaaacagctgaagtccgtcggtgaaagtgtaatcaatgcgggtaaaacggcattggatatcatcgatggggttaatgatgggcttaacgatgcgattgatgatacgatatatggcatcaaggacttggttgtaggcgcatgggaattttcacagctccctatggaactaaaacttgcaaaaacaatcacaacagtcttaagtgtcccctcctaccctaaaataatttggacaaacatcgtcgattcatggaatgataaaatgataaatggcaatgcatatacaagagcacattatatcagttatgcggtcggtaatatcgttggtccaaaaggtgcaggtgctgcagtgcaaaccactactaagctctcaaaagtgggtaaagtggttgaaggtggaacagctactgctcatgtcaataaagggataaaccaaggcaaagcttacattaattctattgttagaaataagaatgatcttgcacttgtcgggattgcccaagacatcgataatacgtataatgcaaagaatacgcctttattaaaaaggattattgaagataaaaaagagagtgtacttagaaaatccgagacgtctaacaacatgggtataggtaatgtcaaacaaggtgatagtacccctctcgcacctggtggaggattagctgctcatgaggcaaaaggcgggcatcttatagaaagacatgttgggaagaccgacgaagaactaattcaaagacttgataagagcaaaatgagtaacaagaagatatccggttcatcatcatttaaagatagagcaactgcagaaagagttgctaatagtgctctcacaaataataaagcgaaaatagaaaaatggttaaatagtgatgtgaaaaagcctttagtactctcttataaagggaatgaagttttaggaagaggaataccaaagggagaagatacaattactgatttaactaatgctaaaattatattgaaaaagaacaaagatggtagctttatattaactggctacccaacgaggtgataccatgatagatacaaacatttccgaacctgtttttcaatttctaggaggtatttttcatcaagatatagaaactccagaatcagcactggacgaatacttagaagagattccaaaagaagagcaagaaactgatatagtagcattaaaagattttattaacagtgattatacggatgaagaaaagaatgattttatcgatgaagctgctgacggagtagacattcgtagttacggagtatctccattagtatggctcgaacaagttattcaaaaaatagaaaagaacattgaaactttataatccataaaaggtcccttgaaaattcaagggaccttttattacttcaaaagccctttaatttttgctttcgttttcggtccataaatgccatcaggatttagtccattcatcagctggaaccgtcttacggcatctgctgtttttgggccatacacaccgtcaattccattattcttagctcctttatccgggtagaagtatagtgcagccagtgctttttgaatttgccttacgtcgtctccttttctcatcgggcttgtcactttatagatgccggaaggcagcgcatatgacgttttcttgctgcttaattttgttgttttctttttagctgtacatgttttacttgtgcttgttttcccacctagcgcttttaattctttttcaatggcaaccttaacttgattccatcttccctctgacaaaatacggtgcgggcaatacttaccgttccagtcttggtgcttacggacacgatcaatgccccatccgcgttctttaagtagctgcgccacaaacttaatagcaagattttccgctgccttatatcgcgcccctcctgacttgctataacaaatttcgacaccaatcgacttacgattgcctgtaccgtttgttccatctcctgtgtgccaagcgttacgattcgttggaattccttgaatgacttgtttatcgtctactgcaaagtgaaaactcgttgagctagagttattcttcatgtaagaaatctcattggctgctgaagcatcattcgcagtgttatggatagtgatatactcagctttcattgggttaggacatttcaatccatattttgatttagaaactaaattctttacaactttgatggccatatatcctctctccttctgtctgtgtaataaaaaaagccactggcttagccagcagctctgtcagcgttattcttactctgttctttttcgttctccattgtttgtaatcgatctgttattgttgatgggattttaacaccgatctgtgctaagttttcagttattgacaatccttcattagcgacagcttcctgacgcacgtaggtaaaatatccctatgtgtgtcgtacacctctctgataacaagtgcagttcgtttttcttgaagcaatttcagtacaattttgagtgccacatgatagcttttggatgatccataaccacccacaagaaactgaaacttttgattccaatcaaagagaaattctttaaaatgtgggtttacttgtttaatcatttgtcatcactcttgtttacaatggtgatctcaaaaggtttatcttcttctgtaagttcttcagtctctaatttcttcttgtctatacttaaacgcatatgctctaatttaaggcgtcgttcgtcttccgagtgggctaattcatcaaactgtttaataaagttcctgagctctgccattgccctagattgagcgttcaagaacgttgcatgaggatcccaagaaaattggaattcatactcttcctcttcgccttcgttcacctcagataggatagtctttttctttttcagttccttaatcatttcctgcttatcagaaacgaacatgattttttgcgctcttataattgcggcatattgaatctgaatttggtcccatatcatatcaacaggggatcgctcctgtattccttccatgatcgatagcgtttcttctggcaggaacttagagaagaatccatgagtcacagcgttttgatttctcagtggagctgcaccacctttatttcctaatgcatttttatttccaagcggtgctcttcctcccttatttccttttgcatttttgttccctttaggtgcgcctcgacgcaaaagagcgctccctttcgatttaggagcgctcccttttattttttcttcccatttatcgtttgctttccattttcggacagtgctacttgttacgtttaattgctcagcaatgtcttttaacttcttactcccgccgctctcttcccacaaacgaaaagctttgtctctgcgtggatctcgtggtcttggcattacatcttacccacctccggatctcatgtttgagtttgtgtttgttttaatagtttttttctgatgtgtctactactgcacctttagacaaaatattcattttttcttatttagacttaaatctatgtcgaaaattattgtttgacatatcttatactaactccactaaaagaggtgataacatgtcaaatggttacaatagctccttcgtgttagttgtggtgttgttcatcctgttaatcattgtgggtgcttcattcctttattagtcttgaaatattttaatctactattaaaggaggtaactatatgggatactcgaatggttatggtagcactttcgcattaatcgtagtgctattcatcctgttaatcattgttggtgctacattcctttattagtctttaggcactttaatccaaagcggccttttggatttcacctccctgtacgaagacgccataagaagtttttatggcgttttgctatgttattaacaacacctttaaattgtcaaaataggatagacaataaaagagaggccactttaaaacctctctttttaattaattgttttcggaaatccttaacaacaaggttttccgcagtacttatgatgctcagtgacaggatcgtaacttgagtaactatgcggaaagtaatgaacatgctcataatgttgatgattcacgctagttgtatgctgcggatgaatgtgaggaacaattgtatttgagaacgtatgatgttcacaacacttagtcggatgcaaaattggaggtaaaattttgcaatgatgcatattttcttctcccttcattattttttatctgttataaactatgttcagaagcatctaatagtactattacaaccacctatttactgctccatgaggatttatcaaacaaaatcatgcacatcacaacaaaagctgtatagattacttattagagcaactctccactccacataaataccccatcgctctgccccacgtttctccaactctttatgatcaacgtggggttttattatgaaaagcgctcctcaatatgaatagaacccatttttcttggaaataatcctcctacgaacgaatgcacccgttattagtgaattcgctctaaaagcctcgtttgatagagcccattcaacccttatcatcatcaaacatgaggctttattttgtttttgtcgggaatattaatttttacgcaatactgctggtgttttatcacccgaattcactgtataaaacctcccagttgagttgatcctcgcttatcgctggggggttttctcattccatgaatgtagtggtgacgcaggaataattcgccgcgccgacctgcctcccattttacactacagattttttcggattcaacaagcgctcaaagtggcaatcttggcataattggctgatcaactcgtctttcattttgcgtacagtttcccttgaaatgccaagatgaagacctattgcacgataactcatcccctccatcatgcaatcataaataactttgtgctgctcccctttgatcttttctgcccccaactcaactgcatatactcgttcctcatagtacttaagacgtttgaaaagacgttcctctctcatatccatttgctgcaattctgcctgactcttcccgggacttccttttggcatagctgcttctaatccatattgtgcaacgccccaatttttcattgggattactgaaccatagagcactctctgcaatcgatgaacctcttttgccatccagtgatagctattgattagattttcaatatcttttcgattcatgattgtgttctccttttccaaataaaaaacggacaccaaacaaacagtgtaatactgtaagtttagtgtccgcaggctttccgtcttggacttaagtattgtttttttctattttaatctcgataggtttatcatataaatcttctttcttcttgatcatagttttactgcataaattgtggttactttcatttcctaataaaagatattctctatttatcgaatgtaatatataccatgtttcttttccatcttttatgtaaactttcgtagttttattaaaattaaatattggttttaaaagggctggaatatagcaagaaaaatatacagagataaaaaatgcaacaattttttgagtatttgtctcaaattgaaaagacaaaattaaaccattgagtccagtataaaaatacaaaaggattattaaatatattattgcaataaagatttttagaggtttacccttaatcttttctatgaagatgtaaagtaataaaaatatggacactaacattataccagctatacttatccaccttataatctcaagccaattaaagttgggattataacttgaaataagctgagctattgagacaaaaccgagcgtccagatcaaaacagaaatacaatatatccccaaccttataattaataattgttccttggagtaaaactttttttcaacaatacttgaagaaaacatagtgactggattccccgctcttataagttgtactattaaaaatccaactgcacttattgcaccaggaaaccctaaagaggctaataattgtttaaaagtatcttcgattttaatcaccactcttaaatttcatagttattccattttaccaatttacgctctccttctcaacgcctattattagacgtatcgggtagtaaaaagttgattaatcacctggttttaaattcaaggggataacaactgttggttaattttattatgctacacaaaaaaataattgatcaaatgctttttacctcaccttaaatcctatctcatgatcaactcttgcaaagctcccctttacagtttgaataacagtcttaccgtgctcaggagcatctaagacatgagcagttccctgattcccatctaaaacaatgatctgaacttttcctgggtcaattttctgctgaatagtgaagtcttttttgacgttaatttctcttggattgtacactcaaagcgccccctatgttatgatagaagtaccagttcatatcaagaacactgaggctaagcgcttcggtgttttttatttttaggcagaaacctcttttatcatgatttccaccctcggctcttcgctataaaacttactgactttcaaatccaccacctgattatcatctttgtatatcaactgattcaaagcactttcacaccctttacatagttatcaacatcaggctttgtagtaggccgcaaaagaccattttcagctttctctttctttttttttgagtttgaaactgacttaggcattggtctgtacactttgaaacaggaccagtaataattgtttctggtcgatgctgagacgcaaccaaagctacatactgcttaaaatactttgatttcgctggatttcgcatatgcaccttcccatttctcgtattgatccacgcggctgtccttgtgcgactggctcaccataaacagtgaacttaatgcaatacaactgttctttacctcccgtcaagctgttcccatagctcaatttctttttctattctcggtgcggagagtaaaattgccaacagagacacgactgctttaagcactcagcatccgctccatttgctttattttttcctcaagtaaacggattgttggtgtaagatctttaccttcagttggatttgaaggtccaaatatataaagtccaccaattactttcacattcgtttcctccttcattcccaatcaccttacctatgatttaattgcattcgatcgcctttaataatcactatgtaatcacgacacatctggtgaattcgtgaaccaagagcctcgtctatatccaaaatctcatcgactgttaactcagaagaaatcagcaaaggcttatgattcaaataacgataatttaagactgactggatttgttcaacctgccaatcggttgcccttggctgactgtttattggtttgaataagtcatcaatgaataggacttcgacctttctcatgacatcgagttttacaactaagttgtcaagttatgccagcaatacttatgataatcttctggaatcatggtacttgcaaggaaagaaaaaatgggctcttaaatccgtttaaatctaaacacaaaagaaccgcaactggcggttcttttagtatatattcctatttgacttcattattattggacagtaccataatcaaaatcaatatctttcttgtctaaatccccctcaaaatttttagcataagtcattgttaaatgtacgcttttatctatccaccaagttccatcatcagtattagtatcccaagtaacatctatatctcttcccaaattctcaaaaaacaccaaatttccaacagctactgtttttccgttgattttgtaatatattagaacaattttcttatcaaatatacctgtcccgtgctttacgattgttaaactataaggcttattaggacattgctcttcaagtataacttcaggatttaaaaataaaacataacaaatgaatagaattggtacaatcgttaacctttttaatacttttttattgatatttaacctcttcaacatagtcctccctttttaacaatccatttcatttgggatacaccctcatcattgaaggtatttcctatgaaaaatgattttgaagctcataggaacccttacatgacagggtttttgttgttttttcattgtctattaagatctaaatcaaaaaaagctataaaaaataaggaatgatacatattatacatgactaatatgtatcactcctttagtttttgttcaataatcgcccccgatagtgggataagaaatagcaaaagaacttgctatttctcaaatacatccaccaaatgttcaatgttagtttgtttttcatacatactaataataaaagtaaaaccttattaaaactttacaacacaaactgaatcgactatagtctaattagactaaaatattgatgtaaagaagggaaaaattagatgataaagtcttttttaatgttggggcagtcgaatatggccggccgtggatttttgaatgaagtagacccgatctataatgaaaaaataaaaatgttgcgcaatggacagtggcagatgatgacagagccgattaattacgaccgtccggtctccggcgttggcctggcggcatcttttgcagatgcttggtcgaaagctcatcctgatgaagaaattggcttgatcccttgtgccgaaggtggcagttcattgaatgactggcatccggaaggcatcctttttcagcatgctttgtccgaagcccgcttcgccctccggtccagtcaaatttgtggaatcctttggcaccaaggtgagagtgacagttatcgttcgctacatgaaacttattacgagaaattaactcttatcatcgagacactaagaaacgagttggaacttgatgaggtaccgttgattattggagggcttggtgactttcttggaaagaccggttttggacagcacgcgactgaatttcgacaggttaatgaacaattgctgcgttttgctaatgaacaacagaattgttattttgttactgcagcaggtttgactgcgaatcctgatggcattcatttagacgcagcttcacaacgcaaattcggttaccgctatttcgaggctttttcgaaaaagtaccatatcctgaaacccatttcgggagaggagcaatcgctgaaagtgaatggtgactattctaaaacagaacagatttaccttcatagtatggatttggcttcgggtaaaatcacgtacgcggaatttgaggcgcggatggcgaaggtgatgaaaccatgattcccttacttatccttggcttgctaatccaaaaccccggagctcacggctatgaacttttggccttaatggaaaaacgtcattacaaatacattgttaacttcacgaaaggttcattttattacaatctgcagcagcttgaagaaaagtgttttattgaacagattgagcagaaaccctcaaccagcgggcgtgaaatccgtaactacaaagtcacagattcgggaagggcagaattcgaaaaattaatgatcaaatacggcgccaaatcggaatatgtgaacctgcaattttatggggcgttactctttgcagatgaattcgacaaaaataaattactggatctgatccaatcacaaatcgatcagactaaaactcgaatcgagctccttgatgaatacctgtccatcactcaagaaattcccggcacaatcgattactttcgccgtatgaacgaaaattcccgttcacatcacttggttaatttagagtggtttgaaaaattgaaagcagaaatagaatcaactattgcagaataaaaaaatgcaaagttaaaaataagaatattagttacctacatataaaacctgtgtcgtagatatttagtaacatcttttatacaggttttatactccttctttaattaaacaagtaatagggttgtcagcacttgcccccaacaagagcaagtgaatcagctccgtgttcttcttttcaatcgctagccgttagtttaattagaattcaaataatccaagacgcggtgaactctttcgctgactgagcaatcgccttcaatttttaacactggacaagataaatctgccatccaatgatcatgcaaagctctacttctgacttccattccagcagtatcatataaagaagcccactctaaaaatgcttttgattgttcatatttactgccaccggctaacacttcatttccataacgctgaaattccctatgccttaatctctcaagccgtatatcttgtggaatccataagaagacgacaaggtcaaaataactttttagattatcgccccagccacacactgcaccagaaagaatccatttctcatttattgttaagtctttttcaagcaactttcgtctttcaggaatttctctttttttagtgaatttatctaaccaatagtaatcatcggtatcaagatgcgtatgaggcaaatgctttgataatgcagcacccaatgttgacgttccgaccccagaggctcccaatatgtgaatattttttttcatacttccccctccttattaagcaaccaaactccctgttgcataaggtacttactattattttgacataaatccctaaagacctttacttttctagagaaatccagatgcgtgttaaaatcatcatacttacgaaaacagtcattattaaacggattcatattccatctcctcagatgcattttcctatgaaaaaagtcttgatttccctataatatttaaacgaatccaatttttagattgtcgtctttaaggaggtttttcatcttgaggtatacaaacagtcatttagaggattggattgaaaacttatacagaaagattgatattacagagcctgaacaaattaattttgaacggattgccgaggctttagatattaggctgtcgtttaaacctgttacaagcttcgcacttaaacacagcggaatttataatatatgcttggacagccgtaaaagccgaactgaacaatggtatgattttgctcatgaattttgccatatatatagacatgaaggcgataaaaaaacaatgcctgcaacctggactgattatttagagtggcagtccaattattttacatatcacttttgcattccaactttcatgttgcgtaatattaatctttcgtacatacaatcccatgcaattgaaaatgtagcttggttatttaaggtgtccccttcattcgctaagaaacgtttaagcatttattacaggaagctgactcaacatttatttaatcaaacagttacgggaaatctgtgcaccccccttttgtaattaataatgaaatcctcatgcatttgcgcgcattgaaaaaaacaaaaaaagacgtctcccttcacgatccgatcgggcaggataaggaagggaatgaaataagcctgattgacgttttgaaatcagaaaacgaagacgtgatagatacgatccagctcaatatggagcttgaaaaagtgaaacaatacattgacattttagatgaccgtgagaaagaagtgattgtcgggcggtttggacttgatttgaagaaggaaaaaacgcagcgagagattgccaaagaactcggtatctcacgcagctatgtatcgcggattgaaaaacgggcgctgatgaagatgtttcatgagttttatcgggcagagaaggaaaagcggaagaaggcgaaggggaaataatgcagaagaagccggatctcatactccggctttctctatttcattaaagtttttttaaaaagaaaatagagaaaaaatatataaaagagtgatgaaaatcagttttgtcatcactgataaactcttcgagaaaagcgtctggatcatagcagatggcttctctcttatggggcgttacttccctccatcaagcgattctaagccggacgttctaaaagctctcctgagaaaatccttagatcggtatacttcagtacattcctagtcactgctttctttatagaggcctcatctatgctgtcgatacccttacatatatgactatcacaatgagaggacttttaatgaatatgaagaatcagttaaaaaacattggttagaagcagttcattttaaagaactactcattttatttcttcttcaattaaatcactggcgtttaagtacaattcttcacaatctcttctgttgactccaatccctaagtagtgctcctccagtacggtgacacatatagagggacgagaaaatctcatttaaactgcccatccgatggcgggcagtttaattattacctctcctgttcctttatcaccctctcaatcccatataaaatcagtttcaagccaaactcaaatgctctgtcagtccccatcaactcaaacagcccgttcgtaaacatcctccggaataatcccgcatctgtctcgctcatggaatcaagaaggcgtatcatctcctcccccggatgctcttcttggtccttcaggatagcagtgacattgcgctcatgctgataatcgtctaaaacgaagtagaagacatagtttacaagcgtagtaaccacttgcattttctgctcttgcttaagtggtgttgattccacgcagagtaacattcggttcgtgaatcggatgatgtccggttcatggggcagcgtcatcatcatgagctgcgtagagcaaggatatcggctgagcacgttccgtaccgttatcgcaagccccatcagctgctccttccagtctccctcggagtggaactcctccagaatcattttcgatacttggttagccagacgctggtaaagcttctgtttgctcttgaaataccagtacagagagggagcctgaatccctagcctgttggccaatcgtctcatgctgaatgtttcgatgcctccctccccaagaagttcccacgaggtttctaaaatcttttcctctgaaatctgaggctgctgctttttcatattatccgtccttttatctaacagtgtaagtttctctttacaggtttataaaatgatgataccatctaacactgtaagactcaaactaacagtgttagattaaatataaacaagaaagaagtgaaatataatggatacagaaaacctctattattttgaaaaagcaccgatcgcaaaagctgttgctcacttcgctataccgatgatgctaggtacatcaatgagtgtcatatattccattctaaatgcctttttccttggtacactccacaataccgccatattaaccgcactcgcattaaccttgccgttatttgcaatcattatggcgctaggcaacttgattggcatgggcagcggtacattcatctcccgtttgctcggggagaaaaaatatgatgatgtaaagcatgtatcctcatttgccttttacagcagtttagttcttggtcttattgtgatggcagtgggtctccctttaatcgatccaattgttcatggcctgggggcaacatctgactccttcggcttcacgaaggactatgtcatggttatgcttattggttcacctttcgtcgtattatttttcacgctggagaatatcgtgcgctcagagggttcagcaatcacgtcgatgaccggtatgattctcagtgttgttgtaaatattatgcttgatgcgttagtcatcttcgtatgccattggggtgtaatcggagttgcgtctgctaccgtcatttccaacttggctgcgagttcattctatgccttccacatgggatataagagccagttcttaactgtctccgtaaagtggttcaaggttggcctggatattctgagcaatgtattaaaaatcggcattccggtctttattatgagtatttttttgggggcaatgtctcttatctttaatcattttcttgtcgaatatggggacaaagccgttgctgcatacggaatttcatcccgcttatttcaatttcctgaatttattttgatgggactatgtgaaggggtcgtaccgttaattgcattctcttttacagcggataaattacgcatgaaaaataccattggatttacattaaaagcgattgtgacgctagcagtaatgtttggcgttatcgtctatttaatttccgaccatctaataggtttatttacaaatgacccgcaattaattaaaataggcagctacattctacatgttacgtttttatccatatttattacagggatgtcctcattatttactggtatcttccaagctaccgcgcaaggaacggccgcttttgttatgtcatttatacaaggaattactctgattcctgtattgttcatcgccaatcaggtgaacggctttcatggggtggtttggtcacttgtcattgcagatacagtcgcattccttgtaggtgccatcatgctttatgctttgaggaacaaattgcagcctgaattgaatagttaagtgctagtaaacatatgacatttaaatccgtattgtaaactaatcaaatatgtaaaaaaagatagtttagccctcataatcggctaaactatccccttctcaaatcctcccactttattattaatgtggtttagaagaattgaacctgcacgagttattccgctcactatcattgattatgaagcttatatattaaaaaatggtgagctcaaaacagtaaacgtcgggcttttttactctcttccttttaaatacacgattagaatcatcaaaaacaataatgatatttacacaaattgcgatttacgcaaaagtcaccactcctcttttcatggacagaaaaagaggagcaaacctatgtctgcgtcttaacgtttttctttgcacaacgtctagtatcttctttggatcaatttttctgtaagaaattcaacaagtgttactcaacgacatgaagaaattgtttatgtccttgtcatttcagttattcaactattggtgtaagtgaactaccagcccatacctctcccttattaagggtccagctgtcattataaaaattagacccacctttattaaccgaagggctgtgaacctcatcccaagttagaaagtacacggttttcggatatttttgtttgactgtattaagaaacacagcataatccaaattaccatcttgtttttgtgtgccgatttctgtgaacgcaaatggcttattaagagctgttaactcatcatatccttgaattgtaaaatcatctgagaaatacgcatctaatccaacaatatcaacatatgaagatccaggataaaagtcagtcttaaagtctcgattggcgtccggtgagtaaacccatatcaggttgtccaaacctcttgtatcagtcatataatgatagattttttgataaagttgtttataaagtgagaagcgctggctgtcttttttgttatattcggttagtccccaccaaaaccattctccattcatttcatgaagaggtctgaatagaacaggtacaccttcattttttaactgatcaaggccatctgcaactttgctcagaacagcctctaatcgcttaccctctgtagttgatgagtctaagattttttcatactcactgtttgaaatatgggaagcatttttcccaaaagtactggatgcaggattagctagatgtaagctaatctgtggtattccaccacttttccaatatgagattaagtcactgttgcaactatagtcgatcgtctcagtaatatcagaaatatagggcttctccaaccatccactggaatagtcacaaccataaattgcgggtaactggcctgtagcattcttaattcggttggcttctttcatggaaaacgaagcatttgtgaatccgccgaatgtacctgacagtatgcgattttcagatcggtttggcagatgagccagccaattcatcaactctttcgttgttgcctgtgcattaggattcacagggtaaactgtatgagcaagagccgactgtgaaaaagatgaaaggattatgaaagatagtaatataaaaacagcaatttttttatacataatattctccgtcttctactttttattattttaatcatttattctgttaaagatttataaagcacagaatctattaagtcatttacgctttttcatcccctttcatatttaaaataagagagaccttccttagagatatttgcatttacccattgtaaatctccattttttgggcattaattatattaaaccgaaaaatatcttctttcatcagacgtttcacctattttttactgtatgcctcacagactataaagcaaactttcccttttgcatttaaaccttattacctatttcattaagtcgaattattttcgatattaagtggtgaatgattttcactctcttttttatcctattaaattattttaaaaaataatcaaaaaacaaatcattttgatccctattcatagcagcaaacgttacttttggtacaaagtcctttataaacagaaagaggagcaaacgtatggtttactcctctaacttagtttctttcttcttggtttttcataatctgatgttttccttaacagcagttccaacccgtcactttctccgcagcatataatcaagattctaataccaatccaaaagttattttgatctactgagaattttaatttgcggtgccctattgcctttttctctctctgactcatagttttaaaccattcaataaaaaaccctcaattgatgtttcatattcatttgattttcaaaaacttcagccgtatcaacctgttaatcttacccgctgacttatatcaaaggagctctaaccaaattttaatggctgtcgaacttattaatagcgctaaaatccattgcaggaattttgtatttactttttgcccaactgatgcgccaataggagaagcaattaaactagcaatcataagaaccagggctggtacaaaaagaacctggcccgtaattacttttccaactgttgcgccaatagatgaaagaaatgtaatcgcaagagatgaagcgactgtgattctaacaggaatatttaaaatcgataacataatggggactaggataaaggcgccgccagctcctaaaatacctgatacgccaccaatgataaacgctagggacgaagccaaccatttattaaatatcacttcttcgccttctctatgggcttgtcctcttttaggtataaacattaaaataactgctataatagccagaattccgtatataaagttaattcctttttcagatatataatgagaaaagtaactccccaatacactccctaaaaggatgctgcttcccatgtaaattattaatgctttatttagaagaccactcttacgataagcccaaacaccgccaagtgtcgcaaagaaaacttgaatagcccctatccctgaaacttcatgggcagttaatgacatcactctcactaaagagggaatatacaacagcattggataattaataactgctccgccaataccaatcattccggaaataaaggcaccaataaaccctataatgaaaagagttgtgataaaggcaatatccactttggtttcctcctatcaaaggaaaagggtatctttctattcgataccctttcacattcattagcctttttgaatccaaaatttcaatacatcgccctcgtccgtttgctctaaaaggtcatgtccgcctgatttagaccaggctgcaagatcatttttagctcccttatctgttgcatgcacttctaatatttgacctgattccagttcattcatcgctttttttgtcctgacgattggcattgggcatgccaggccttttgcgtctaatactttatctgatttcatgttcatctctcctcttattaatagaaacttgtgttaccgtattgcacagcggtttgggccaatctccatttcacgctgtttttcttcatctgggctgattttccccatgtttgtttctcgaatctcttggtatgcatttggttgcggaggcaaatgatctgttactaggtgtctaaattctgtttcatccgcaatgttcaaaccatggttctcgctaaataatgtacttagttttttaccaacacttccatcctcatttagctcgtcaatgatcataaagtgtgccggtaatacaattaaatcctttgataacgctttgtaacggctataaagcgtttttcttaaatctcctacccaatcttctgccataccggctaagtctggtctgccgattgaatcaataaacaaaatatcacctgaaagaagatacagatcatcgacaatgaaagaagtggacccaatcgtgtgtcccggagaataaatcggttgaattttaatcgttgtatttccaatgatcatgtcgtttccttcttccaacggctgataatcgaataccacttcttcagcatctttaggcggtaaccagtaggttgcttttgttttttcagcaatgactctgccgcctgaaatatggtccgcgtgaagatgtgtatcaaatacgtgagtaatcgttgcacccttctccttcgcaaaatccataaagaaatctaccatacgtgtcgcatcaataattgctgcttcaccattggaaatgaccatgtatgacaggcagcctttaccgattcgaacaaactgatacatctcaccgccatcttttaaatccccgacttttaccggctctaaatgttcgctccatgctttcattccacccttaagataggatacagaatgacctgcttcagatagcatttcggataccatgacggatgaaccttcttttgcacaaacgaccagcacttctttatcagaaggaattttctccaatatatcttctacgccatctaaaagatcaaaataaggaacattcaaatggtcaaagtcatgcccttctatcttccaatcattaaaatcattttcattacgcacatccaaaataaataaaggttctttgttatagattttttttgtcacttcttttggggtcattgcctttacggtcatgtttcaatacctcctatatcaaatcttttagcggaactaaaacgttaaggatacatcagcatctttaacaaaattctaaaaaggtaacagccccgcctacttcgattccttgtataaattcatcttttgttaaacccataacgtccatcgttatttgacaaccaattcatgcaactcccatttcaatcagttaagaatagaaggcacatttgcgttcctacaaccttctgcgacatgctcttttccttgtcgcaatattacagactttataagcatcaaacagaccgccatttgccgcaataatcgctactcttgtactcatctgttcatcatgctttttatttattcggttttacctgtccactcccgcataccggggacaacattaataacttttttaaaaccttgttttttcatggtgtgggccgccatttcacttcttcttcccgaatggcagataatataaatttcatcatttttgtttaattcattagagcgcttttccacttcaccaagagggatatgcacaactccaggaatatgagctttttcatactcctctatctctcgtacatctaaaatgttaagagactcgtcactatccactttctgtttgaaagcttctaatgaaatatcaggaattgaagatgcattttctgatgaatgctctcctccttttcgaagaaaatgacgaagtatttctccctctgcttcagtacctagatattcatggcctgtactttttgcccatgcttccagatctgctgtggaacctttatctgttgcttgaatttccaatacttcaccagcttttaaatccttcattctcttcttcgtttttacgataggcattggacacgccaaacctttagcgtctagtacaatagttgctttcatcattttttcctccttttttcatataggggtgggggtatataaatatacaaaaagtttctcactagaagttaataccatgtattcatgcccccttttatatttgtgatgtttttaaatccttgtttcttcaatatttttacttgcctttaaacttctcattccgcttagcaatgagtaaatgagtagcattagataaataagttgacactgccttcctcagcatctgccaaataagctgctacaccagcatagtcgatatcatctaatagttctttttcctgtaaaccaagaagatccattgtcatcgtacaagctacgagctttaccccctgttcttgagccatctcaatcaactgaggtaatgtaagtgcattatgctttttcatcacatttttaatcattttagggcccatacctgcaaagttcattttagataaacccatcttatcagcaccacgaggcatcatctttccaaacattttttcaagaaatccttttttcactggaatcagctcttctttacgtaaagcgtttaatccccaaaaagtatggaagatcgtcacttcatgatcgtaggcagctgcaccatttgcaataatataggctgccattgccttatcataatccccgctaaataaaacaattgttgtgcgttttgtttgttctgtcatgtttattcccccaactaattacccctgtgggtatattaaagtcaaaaaaattttttcgaaagatctgcttttattcaactctttaaataccatagggggtataatataacgcatataaaaattcgtcaaccttaggttgatgaatttttatcggctctttaccaataagtcaactgcttcttttactaaattttgtgtgtcttcgcctttttctaaactttcacgaacacaatgttcaaggtttgtgctcacaattaaacccatcgctcgatcgatcgcattacgggaagctgctaattgggtcacaacctctctacaatcttttccttgttccatcatagtcaatacacctttaatttgtccttcaatccgtcgtaagcggtttttaatcttttgatcatactccatatatcaatgaaatcctttctttcatttatttttacatttacatgctgccagttcataactgtttacatggatacctttgcgctttagaaaacgcactcctaaatttaattccacccgatcacgagctattatgtgtattttatcacgtggaatctctaaataaaaacgttttagatacgcatatgggatgtttaaaataatattatccgaaaaattggctacatcgttataatgacgaatatctaatattgtgatgtccatagcctctaatttatctttatggatacaagagattccggttataggataataccgtctatacgatgcaatgataatcacaaaaataagcaggaatgcaataactaaataattgatactacttacaccaccttattaactctttgttattcacaaaactataatatacccccataggtatatagtcaagtgtgaaagttactttctttgagctgatagattcatttcaatatccgcggattgaaaaaatacttacatttcgataatgccaattctgctaaaagtaactcgaataaagaaataagccgattttattttaaatcgactttattttatcaattacttttaaaattagcacaagactgcttggatattacattgggtttcatttgcataaaaacaattcttaggtactggttccccatgtttcatgctggatgtgactccaattactcagaaatctgcgaataactatgctaatcttccgcagccactgcatctgctttggttttatgaactgtaccaaatggatggttaggaggagcataaatggagtaaagttttaatggcgtattacctgtattaatcacgttatgccaagtgccggcaggtacaacaatggcagaatcatcataaacatttctttgaaagttcaaatgatctttgctctttcccattttgacaaccccacgcccctgctcaatccgtaagaactggtcaacgttaggatggatttccaacccaatgtcttctccaataccaagactcatcaaagtaacttgaaaatgctttcctgtccataaagcagtacggaacgtattgttttgttttgtggctctattgatatttacaacaaatggttttggtccataatcctttaaaagaagatttctatcttcatatgaagagcgcaaatcggcacctctgtgtacgttctccatctcatttggaatagtccaataaacagatcttccatcattatacatcggtacagtcacataataataacattgaggcgaaaaagggttatagtacattttttgatccccacaattataaatttttgtgatagtatcctatgcatttattaagggagtgtgctaaatcaagaaaaatcatattaaacacaaaaatgaatgttcgatcaccgtttgattcacggatgaataatttatcaccgaccttgtaatcgttttctggatgttgaatttcactagcctttgttaacaagacatcgaatgacacttttatatcatggattatcaaaggtcgacgatcctaaatggcttttgaacatttacatagcacaacaacagagtatacggaattctgttgtttgtcccccctatcccagctcttttagatttatccctttggatgcgccttgatggccagcttttcagcagcgtagtatttagcgcctcctgaatcgttatagcatatttcaacgccgataaacttgcggttcccagtgccgtttgtaccgtcacctgtatgtgggctcgtttttagtaaaccagtttatattctttttgggcacacaatagaagcaatttttcatatgaaaatttcgtaatcttacacctctttaacttgaaggaggatttttgcatatgtattttcatacccgtcaactaccatctcatccagcatatattcctcatatgcattttcccctatttgcattccattcttttcaatgaactcaatgattctccggtacgcctcttcagtatttccgcctatttcatatccaactgcatacaggccttttggccgtacatgataatttatgttctctcccccattttttacttttatataaaagtaactgtaattgtagaagtctttttctaagatttgttcccgtgcaaagattccgcctatcggatatccttcatctaattcatattgctgaacttcatgaatgagttctgaaatggctgccacatattttcgttccggtaagtttaatgtttttcggcttaacatgaatgtttcttcatttaaatattcaaaagaaattgaggaaaaatcagtctcaagtgcttgttctgtaagcgtcacttttgtttgtaagatcgtttgcaactgcttaagctcatttatttttttatcaatctcaatagacttttcttttagaacatgcaggatcttgtctggtgtttttccttttattagacactttatttcttttaatggaaccccaagctctttaaatagactgatgacttgaaaaatctcaaattgatgataggaataatatctatacccattttctttttttatttccggcgagaaaagaccaatctcatcataatgaaataaggtttgtttttttacacggcagagcttcgaaaactcccctgttgtgaaatacttcttaacatcttcgctcataaaaacctccttgactatacggtaaccatataccttatgatttgattgtacttgaaaaaagcttcaagcgaaaaggataggtaaaaagggttcaattgagtaaaaggggaattcagatgaaaaaatcaataaatgagcaaaaaacgatattcattatactattaagcaacatcttcgtagcatttcttggtatcggtttaatcattccagtaatgccttcttttatgaaaatcatgcatttatccggcagcacaatgggttatcttgttgcggcttttgccatttctcagttaattacttcaccttttgcaggtaggtgggttgaccgtttcgggagaaaaaaaatgattattctcgggttgcttatattcagtttatctgagttgattttcggattagggacccatgtttcaatattttatttctcgaggatattgggtggtgtaagtgcggcttttatcatgcccgcggtaacagcatatgtagctgatattacaaccctaaaggaaaggtcaaaggctatggggtatgtttctgctgcaattagcacaggctttattattgggcctggtgcgggaggatttattgccggctttggcatccgcatgccgtttttcttcgcctccgccatcgcgttaatagcagctgtcacttctgtttttatactaaaagagtcattgtcgatagaagaacgccatcaactctcatctcatacaaaggaatcaaatttcattaaagacttgaagagatccattcatcctgtctatttcattgcatttattatcgtctttgtaatggcttttggtttatcagcttatgaaacggtattcagcttgttttctgatcataaatttggcttcacaccaaaagatattgcagccattattacgattagctccattgttgcggtagttattcaagttttacttttcgggaaattggtcaacaaacttggagagaaaagaatgattcagctgtgcttaataaccggtgcgatcttggctttcgtgtctactgttatgtcaggatttttaactgttttgcttgtaacttgttttatttttctggcgttcgatttgctacgtccggccttaaccgctcatttatccaatatggccggtaaccagcagggtttcgtagcaggcatgaactccacatacaccagcctgggaaatatatttggacctgctctaggcggtatactatttgatcttaacattcattatcctttcctttttgcaggtttcgttatgattgtcggccttggtcttacaatggtttggaaagaaaaaaagaatgatgctgcagctttgaattaattcattttctataaagtcaagtcatttggatgcagggaatgcccctggttaggcacaataagaaaaggtacttaatttgataggctacatgttgcttgacgtgaatatagtttaagctgagttttagcaatatcaggataccgggataagaaaaaaggagaatgtagtatgagtataaaaataaaaggagtaactgatgataatcgtgctgcaattcttgatctacatgtcagccagaatcaattatcatatattgaatctacaaaaatatgtttagaggatgcaaacgaatgtcactattataaacctgtcgggctttactatgaaggagatctagtcggttttgcaatgtatggattgtttcccgagtatgatgaagataataaaaacggacgagtctggcttgaccgattttttattgacgaacgctatcagggaaaaggattagggaagaaaatgcttaaagccctcattcagcaccttgctgagctatataaatgcaaaagaatttatttaagtatatttgaaaataatattcatgctatacgcctttatcaaaggtttggttttcaatttaatggtgaactcgactttaatggtgagaaggtaatggtaaaagagctatagatatccaggcctccttttttgctgagaaacgtttgaacttcgataatgattacctacttaaactgcaagatcattgtttaaaaaagcctggatgaaaatttcatctcaggctttaagcatcttattagtcaaaatctcatgtgttttatccagatgttattcttttttccggacaatttctaaataattaatatgccggccaactgttttgtgcactttaaaaatatacccatcggcttctataacggacccaactgcagcgtctatttgttgagtcataaaccagccgcctattgtatccacttcgtcacttgctaacgtcgttcccaataaatcatttacatcttcaatgagcactttcgaatctaagatatagtgattatcatttacttttctaatattaggcacttcatctttatcaaattcatctctgatttccccgacaatttcttcaagaatatcttcagcagtgactaaacctgaagtgccgccatattcatccacaagaatagcgatatgtgttcgctctttttgcatttttaccaataaatcatgaattggaacggattcaataacatggataacagggttgatatgattttctaacttgaaatcctcttttatcttctggtctgtgtcaatataagctgacaaaaattctttagcattgataaaaccaatgattgaatctttatctccatttaggactgggtaccttgtatagctctctgtcttaatggtcttaacaatagtttcataagaatcctcactagaaatcgctacgatctctcttctcggaatcataatttctttggcgattctttcatcaaattcaaaaatattatttacatatttcaactcattttgattgatttcaccgctcttatagctttcagacagtaagatgcgcagttcttcttcagaatgagcaagttcatgttctgatgcaggtttcaaaccgaagagtcctactataaaccgggctgaaccatttaaaaaccatataaaagggaacaggatgcggtaaaaccaaataattggctttgcagtcaaaagagtgatggtttccgctttttggatagcgagtgttttaggagcaagttctccaactacaacgtgcaaaaaagtcgccatcacaaaagcaatcactaagatcaatacatgtgagactgtttcacttacatgaaaatgagcaaataaggggtgcaaaatcacttcaaaagtcgattctccaacccagccaattcccaacgctgtaaccgtgatccctaattgacaagctgacaaatattcgtccaaatgagtaatgacctttttggctgatacggcacctttttttccctctaatatgagttggtcaatttttgatgacctgatctttactatcgcaaattcagtcgcaacaaaaaatgctgttaagacaattaaaatagtaaagattataaggttaatggttgtcaatgatttgccttacctagtaaggcgtacacctccgatataaatatttatttttataacccgttttttctgaataaacaaaaaacagtatatataacattataagttcaaaagaacctaaaatcaactctgaatgatgtaaataatcatctttttccgtatggagagtggttcccgtagtattcaactagcgattggtgacgttttaaggcttaaaatagaaagcaaaataaaaacacacctgaattttctggtgtgttttaataatatccaaccgtcttgatttatttaatgtctttattaaggttttcttttaaaatttgaatcaattccgcctgttgctttatatttttgcggccatttctattaattgcagcaagttcacagacaattccagctgaaatgaaaaacaataaaccttcaaacattttaaatcccccaccatctaagtgatagtcaaatttgttttttctttttgtaatacctgcttataatcttccttacgctgatatatgttatttaaaatgagtccaataatgacaaacagtgttcctactatatcaaatgcagttatgttatatcctttgatcaccatgattaacaatgtagtaatggggacaaagttaataaataaaatcccattaatggatgataggattttaatgccatagttccaactaaggagggctatgatacctggtaaagtaatcataaataaaaaatcatacttaattgctgcaatcactttaatactcggtaccgacacgtaaccttgcgcggtaagtatagctgtcatgattcctgttatagctgtgccgaataaacatgtcaatgttgaataacgaagtgtggaccactctcggaatatctgtccccccattgtgtagacaacccaccctaaaacaccaatgaatataaagagtagcgagaatagatgatcccccaataaaaaaaagaaacttatattacctttggttatgaccatcgaagcccccaaaaaggcaatcaatatactgatcattgtgtattttttaggtttcacatgtttatatccccatagaataacaattgaaagcattggcatgagtgcctcggcaatggatgctgtcataattccagacttccccatcaacctttgacctaaaaaaataagaacattgtatacagtaaacgccataaccccaaataaaatgatccattttgctttaccctctaaatgaaatgatttttttccttctcttaccaataataaaatcactaacataatcgttaccacaccgtagcgaataaatgaaaaataaaacggatcaataacttctaatgcatgatctgcaactggaaacatcgcgccccaagacatacttgctactaaacatgtaagggcaccaatgaataattgactttttttcattgaattcccctccttttctttaaaattacaatgagaattataaaaagaagtaagcatcaagtaaaatgaacaaaagtgatgaaaaacatcattgataatgatactttaatgaagggggatcttcatggaactgcgagacttacaaattttcaaatgcgtagcccatcacaagagtattaccggtgctgcaaaagagttaaattatgtacaatctaatgtaactgcgcggattaagcaattagagaatgaactcaaaacacctcttttcaatcgtcataaaaaaggggtttcactaagcccagagggccgaaaaatgattgaatacgttaacaaaattttgaaagatgttgaagaactggagcaagtctttctagatactgatataccttctggaatattaaaaatcggtacagtggaaacagtgaggatactgccgaccattatagcttcctattataaaaagtatcctaatgtggatttatcattgcaggctggtctaacagaggaacttattaaaaaggtcatgaatcacgaattagacggagcttttatttcaggccctttgaaacattctatcctggaacagtatgatgtttatactgaaaaacttactcttgtaaccagtaacaaaacgtttaatatagaggatttttcaacgactccgattcttgtttttaatcaggggtgcgggtatcggtctaggcttgaacagtggctcaaagatgaaggtgtgctcccaaacagaatgatggaatttaacatcctggagacaatcttaaatagtgttgcacttggactcggtataacagtggtaccggaatctgctattatgcatcttgctgcacaaggtaaggtttattgtcacccattacctgagaaagacagctgtatctcaacaatctttatacgccataaagatgcgtacctgacaaattcaatgcgcagcctccttaagaccattgttgaacataaaaatatgagtatgtcttaaagtgctttttctctttctatgttaacttcttaaataaaagagaaagcgcatctccacttcgctacccttattcacgcaaaaaatagagcagtaaacatgtgagttactgctctgcttcgtttatccaccgttcatttgttttacaatgtattcagcatcatttcctacaccttgaagcaacgctgaacctcgcttatgctgccaaggcaaccctataaagtacaatccttctacaggtgaaacacctctatgatgtatgattcgaccttctttatccaaaacaccttttatatttatccaacataagggattcctgaaaccagtagcccaaataatattgtttacttctaatgtagatgaatctttaaaaatgatttcattttgctttgcggcaatgactcttttttttaagatgatctccttctgttttattgcatgttttaattcatgcccaaatactggatcacctttcttttgaatgaatttgcctactattgatgtatgacttgcatgtaaaactcctagtttatcaaaccaccaaaagatgcttctttttcctatcattaaagggaaataaacaagtttattactacaagctaaatatgtaactctttctttggataattcaacagctatttgagcaccactattcccaccaccaactactagtacatttccatatgccaattgttttgaattcttatattgtgatgagtgtagttgattaatattatcggataaatcctttgatattgatggaatattaggggtatgaaaaggccctgtagcaatgacaagattcttcgtttgatattcttcccgatttgtttttattaagaaataattctttatttttaggacacttattacttctgtccgtaattggattggaatttcaaattttttaacatacttctttagataagcaacaatttcattttttgaaggaaatccatgtttttctccttcaagatgcattccaggcaaagagctatacattcgagaagtaaataaaactaatgagtcataccgatctttccagctctcccccaccccatgacttttatccaaaataataaacttttgatcggactgctttagataataccctatcgagatccctgcttgaccagccccgattactatagtgtcgtacacattatcaccccgccaatttcaaattgtcagtagacagaatttgcaaaatgctagttgatctcctcactataaagttagataaaaaatttaatggtgatggtggttacgcggcttctccattttaggctgacaaaggatcgcattgtcgtgattatgcgcttcggtttccatttgaatggttacgtgcgtaatgcctttatgctcaagttcatgttcaattttgcgtaaaatattttcactttctgaaatggtcagttgatcgtccacaactgcatggcaagaaagagcattcaatccgcttgtgatagaccatatgtgtaaatcatgaatgttttgaattccctctgtcccttcaattgtacgaatgatatcagagacatcgatattttctggagttccttccattaagatgtgaatggaatctttagtcacattgtaaccgcttcttagaacaagaatagccacaatgatactagccaatggatctgcccagccccatccaaagaagatgataagtatggcagctaaaatggcacctacagagccgagcatatcgcttattacatgtaaataagctcctcttatattcagattattctttgtatctccgccactcatcataatccaagcgaccaatagattcacaactaacccgatgatactaattgtaagcatgccggttgctgctacttttggtggattagagaagcgttcgattgcttcataaatgatataaagagaaataagaattaaggcagcaccgtttatcacagctgcaagaatctcaaatcgtttatagccgaatgtcttattgtgatttgcctttttttcagctaatgtaaaagcaatcagggcaaccattaatgaaattgaatcactcagcatatggcctgcatcagataaaagcgccagactatttgttaaaaatccacctatagcttctattatcatataacctgtaatcatgataaaagagatcaataaaacctttttatttgctccttcattatgattgtgacccataaaaaactcctccttaactaaagtttttaatacatatgtatttattatttcaaatctgttatgaagcattctaacatgatgcaaataatatttatatatgagcatgtgttcatatataaatatatctgctctttactgaaatgtcaaaatattttttatagaaatcaacaatacctccttaattattctcttattaacataaaaaagcggaacaaacacatggtttgctccgctaacctagtttctctatccttttcttgtagtatgcaactacaatttacctgttaaaaattaggcctcaccaagtccaaaactccagtcagcattatcattttcaacaatagatacaattaaatcagttgatgcgataccacactcagattccagtctttcggctaacagcctgtagaatttttgtttcttctcttccggtcgggatttacttgtaacagaaagaacaacaagatttttggttcggttaaatcctaagcctgtatcctcaataatcatatgattttctggatgttcatgcacaatttgataacggtcctgttgaggcacatcaaaagcctctactacaacattgtgagcgacatctaaaagttttttcaaacttgattgatctcgcccttctattaagtcaaaacgaagtaatgacataaaatcccctctttctactgtcagatatttctaatcatctgctacataatgtgctcatttttattcttactacattagaataaaataatttcccaataaccccttcattctgttgttagtcaagcctatgttatgatgtgtatttccataggcaatatacagaatcaacttcgagtaattaaccattttttgaaatagccttatcacttactctagaaatcatttattcttctaagctttagtttacatgaagctctgctatcatatataattcaaaattaagatggaagacatctcaaaatcagatatcaattatggaggactgcatgaatattcagttgttacaggtttttctcactactgctcgtgaaggcagtatttccaaggctgctcagactttaaattatgcacaatcgaatgtaacgaataagatacaacaactagaaaacgatttacagacaaaattattctatcgccatagtcgaggaatcacacttactcccccagggcaaattcttgtttcttactcagagaaaattctacatactattgaagaagctagagcagccatgggcgaatcatccgcgccttctgggccactgcgtataggatcaatggaaacaacagctgcagtttggcttcctcaactccttgcacattataataacctctatccaaatgttgatttgaacctagtaaccggtcctacggaacaacaaatacaagcagttttacattatgagttaaacggcgcttttatttcagggcctattgaacaccctgatttagttcaagaaaaggtattggatgaagagatggttcttgttacaagtgcttcacaccctgtgatttcttccattcaggatgttcaaacacaaacaatgcttgtattccgtaaaggatgctcttacagagcaaagctcaatcatatcctccaagaagaaggtttattacctataaaattaatggaatttggcatacttgaagcgatcattggctgtgtaagcgccggcttggggatttcactgctgcctctttcaatcattgcttcgcatgaaaaagaaggccgcatccgcagccacactatctctgacaaatattctttcgtatcaactatgtttataaggcggaaagacactttaattacccctgctttatctgcttttttaacgcatatgagggatcattttcagataaagaggccagatcaatcgtaaataaatggatggaaggcatgcttcgcctcaaaatacccctgatcagttgtctgatataaaaatataggcgcatctcaatgtttgtatagagcaaaaaagcaaacttcggtatgtagtttgctttttcttcgtgattttgcactcagaatcgtgaaacctagtcgatattaggatgtagattttcctcattcaaagaattttgaacgaaggtcattgccctagacacttggttgcgtcttgaagttaaaggctgactatttcctaaagcgtcaatcgctctcacaactattaaatattcacctacagatttcgggtgacaacgggaagattgatattttcggttggacaggggcagaacatccaattgtaacagttgaagtatccactgatggaggagatcctgcagatctgagtgatattgctgttaattgatcaacttgtttttgttcggaatatactcagtatatagccgcatattcctcctgcaatagctggaatgagccaccccagccctatgttatacatagggagaatctgagagaaaatatgattcacaacttcaatttttattcccgcctccttcaaaccgtcaaataagctgatgatgaatgcgaataataaactgccttgatacacttctgtcttccctttaaatacagaatgcaaaaacgttaaaaatattaaggaaatcgcgataggatacattgtcagtaagacaggcattgacaccttaatgagctgggttaatcctatatttgcgacaagcgtactaaacactgataaaacgacagcaatttttttataagaaatgttcggaaatagttcatgaaaaaatgaagaacacgcagtgatcagtccgacacttgtcgtcagacacgccactgtaatcattaagcccaataagattgaaccataagaaccaaaataataggatgaaaccttagccaaaacctctgctccattttctaaaatccccagttcttcaacgctggaagcccccatataggaaagggctgtatacataactgctaagagtacagctgcaatcgcggctgcttttgcacaaacacccatcagctgttttttggtagaagctccttgttctttcaatgcattcacgatgataattccaaaaacaaatgctacaagggcatccagagtgaggtatccttcctgaaatcctttaaaaaacgcttgtgatgtgtacccttttgatggtgcttgaatggttccaattgggcgaataagagctaccactacaagcaatccgataaatgtcagcttaattggcgtcaaaaatttcccaactatatcaatgatttttgaaggattgagtgataacaagcatgccaatgcgaaaaataatattgtaaataagattaatgagacagggcctgcatcatttgataaaaaaggttttaccccaatttcaaacgatacgtttcctgatcttgggatagcgaaaaaaggcccgattgccaaatagagaatcgtcgtaaatacaatgccaaacaccgggtgaacacggctggctaacgactgtaagttttgtttacccgaaaaaacaaatgctgttatagccagtaacggcaatccaactccggtcactaagaaacctgcattagcgacccatacatttttcccagccatttgaccaagcataggcggaaaaatgaggtttcctgctccaaaaaacaatgcaaatagcattaatcctataatgatgatataggaagcagacactttttttgacattatatatcctccgattaaagtagacacttcttgaatagccaggaaacattacagatgctatttgcactggcgcagtgttgattccaaaataagtttgtgtcagttttatatatttttatcaagttcaacaaaagcatgatcattttgatcgtttccgatatcggttaaaaaaccaattgcaccaaaaccatataaacaacggttccccccgctatggaaagaagcatatttttcttccacaagtgaagcagtacaactgcagctgctccaaccaattcaggaatgccatgactttcagaaagcagactcacatcttttaaacaataaatgaccaaaagcccgattaccgctgatggcagcactttaccaagatattgtacatatttcggtgtcggtttgccagacgggaaaatcatgaatggaaggaaccgtgtcagcattgttccaagcacgaccattgcaatggtgatcatttgctgcgtcatagtcatcgtcatacggaaacctcagctttctccaatggttttctcagaacagtcagtacccctaaaatggcgagcatagcaggaataataaattggtttccgccaaaaaggataagacaggctactgaaagtccaagtcctgagagagcactgtaatgctttttctctttcatccattgttctatgaatatcacaataaacagagcagtcatcacaaaatcaagcccttcggtattaaacttcacgtacgacccaaaaatacctcctatcgctgcccccgcgacccaatataaatgattaagcagtgtcacaaaaaacataaaccagcccttgtcaacattcgccggaacattagcggtataattgatagaaaatgattcatcgcacattccgaaaatcagataaagctttttctttccagtccccctgtacttatccaacatggaaattccataaaacaaatgccgggcattgaccattaatgtcaaaaaaagagcattcatagggttgaacgcaccaagtaaaaaattcgctgcaacaaactccattgagcccgcaaatatcataaaactcatgatgattggatagattgcgctaaatcccaaagaatgcataaagattccataagctatccccaaaaataaaaaccccgcaaaaatcggaattgtatatgggaatgcagaacgaaatgcagcccatatttgacttctcttattcatatgagtgtttatagcaggagagcttaaatgtaacgattctttatttttattcaaatcaacaacctcctacatttcatcaattggcacacttacagttcttttttctgtactcatgactatgcttgtgtcaactccactaatagcagggttctgcattaatgaatcaatgataaaattccgataactctccatgtccttcgccacaatcttaagcatatagtcatggcttcctgtaagtgtgtagcattcttgtacctgtgggaatttgtttatatcctctaaaaatgaatgaattgtctccctatttaagggtgataagttgatgagagctagtgctgtgacttcgattccaagttttttctcatcaacaatagtcgtaaactttttaattatacctgcttctactaggttctttgttcttgcaaggcaagctgatggtgaaagcccaattttcttagataaattcagatttgatattgaagcatcttcctgcaattctcttaagatggccttatcagtttcgtcaagcataatacccatttcataacccccaatacgacttaacagaattacatttcatccgatttaaacaataacgaattttcattcgataatcaaatattttttaaatttaattccttttaaaatattattcacagaataaaattatccccatgattacctcataattaaattaacttacatcagaaagaagtcatgggagagttatgtacttgtgtgacttgataccaacatcataagaaacttatcagaagccaaaaagttattgcggtctcaccgaaaattgaatttgcggtgccctattgcctttttctgcgaacaaaaattgttaaaattcacaaaacagaaagtctactctattattattttaaattcgtcctctagttcctcttgagcctcttgtaaaacttctaatacatcatctgcgtatgaacctaaaaatgtattgctgaactcaaaatttttcaagactaaagtgagcggcaaatccacccaccctgtcaggcaatcccataaagcgtctaaatttctcccatagtagtctgggaagtctagtttatcttttaaaacatcatgtaaaacttctatattttcaaagtctcttccatctatcattatttttctcattagaaactatgccctccattattttatcttaacaaacgttttctttgtaacagctgtttgtccaaatgaggctgaaaacaaataaaaaacaccgatagggggaaactattggtgtttacaagacattttcatgcccggtaggcataaataatgctaaactttgtttttgaaaagctatcatatcaaatttttatgttacagcttttactatcgtttaatctaattgaggagtaaaacgaaatatgtttgaaaatcacatatccccaaaaaattaaaaactaagcggcagttcttcgattgctctcatcagaaaattccctttccatttcatttgttccttttcgccttttaactgtatatttggacagcggcgtaataaggtggaaatcgcaatcttggcttctaagcgggctaactgtgcaccaaggcaaaaatgattgccatggccaaaagcaatatggcggttgttctttctttcaatatcaaatatgtcggcatttggaaatatcttctcatcacggtttgctgatgctaaagaaatgatgatcacatctttccgtttaatctcctgcccatgcagtataaacggttcagccgtccagcgaattgtcgttagctcaactgggctgtgaaaccgcaatgcttcttctatggctgaattcatcaagtctggctgctggcggagcttttcaaattgatcaccgtgacacatcagagcatatgtcatattggtgattaagtttacggttgtttcatgacctgcaacgataagcagcataatcatcgagtacaattcttctgtacttaattgtgtgccttcactttccgcttgaattaatgcactgattaaatctcctgcaggttctctcctttttttgcgaactaaggattccagatattcaacaaactcccctaacaagtggtcattctcctgaagtctttcaggggcatctgaaaaatcaataattacttgcgaccacactctgaatttttgacgatcttccaagggaatgccgagcatttcacttatcacgataatcggcaatggaaacgcataatcgtctactaggttcatgaatttgttgggctgcactttatccaataaagaatctgcgatatgctggattttgtcttccaactgcaaaatcatccgatgcgtaaatgctttttgaacaagagttcgcaagcgattgtgatccgggggatctgaattaagcatatgttttgttaaagactcttcattcttcaatagagcaggacgtttttcttttgcggtaaatacattttcatagtttttctttaatttttcattctttaataaatgtattgcatcatcatatctcgatatgagccagcctttccccagagatcctaaagataatgggtagagaggctgtgattttcgcaattctttataaaattcatacgcttcatctttaaatgctctcgaagacaattgactttccgtcaagatggttacactctttttttcttttgaagacattcattcgacctccatctttatgaaaggttatgttaatctttaaatatataatcagtacgatttgtaaaatgatctattgagatcagtattcatgctaagggccaaaatgccgcccccgcattttgaaataaaaggtatgagacagtcattaatcattttgctgcccaaactctttccctgataagatggcgaaactcctaatacttctaaataccatgccggctcttttaagtatttggaatattttccaacttcattagtcacagtcactgtcaacatgttcaatactgaaaatcctcccattttgattaatgttatcccccctgctgctatataatcgatcaagttaatgtcgggtttatcacgatgttttaatagagcggcaacaaccatttcaccattactgaatgtcaacaaaaaagaaatgctttttaaaatatgctcttgtcagtactttatgcatttcaaaaataaatgaatgatctttttttcgcgttttacgagtaaatccataaaaggatattgattgaaagattcatggagtagctttgccacttagcttattcatctgccctagcttgtcgataaagaaacattgatacatctcctctgagcaagtaaagaaggaaatcgaattaaagcgcccttcctattggaaaggcgcctgccgttttactgtgccaaaatgtttttcatcagtgagtttttataaaatcatttattaattgatcagttgtcaatattgtggcaaattcatcatgcaatgtagctagagatatattatgaatagtcgccgcatcataatatgtatcattttggtctctcattccgaaggctgctgttgcatctgaaatcaggtatgtatcaaaccctaaattaccactcattcttgtggtggttgatacacagtgaggcgtggttaaaccagttatgactacagtgtttatttcatttaattttaagaattcttctaaattcgtaccaataaagctgctatttactgtcttggttataatgacttcttcatccataggcttaactatttcctttatcgcaaacccttcattctttggatggaataaagaatgaggtttatcagaagtgtgttgtatgtatatgactgtccatcctttttctctccataattttagtattttactaatattttcttccgcctttacgttattccgttccccccattttttatcatcgaaggctttttgtacatccacaatgattaaagcttttttcttttcttccacaagataccctcctacgtagaatttctatttattactacattctaaatacaaattttacttttgtacaattgtttaatgatgaatttcgaatgagcgccttctttattgaaaaatgcgttctaaactgcaactgtgcccaagccgttaaccttcaataatctaatctgagaatcactggctctacagagaatgataaaaagcactctaataacgagtgccgaaatgaaaaactattgatttagaagccatttgatacgctcagctgaaaagatgtagtggagtattattagacataaaaagacaataccaactggttttaaatgactaaaataaagcgctgcaacagccagtgcaaagatcaataattcaataactagccttgttaccccgtttacagctattacagtttgtccacttcgactaggatcattaggtactgcaaatacagaccagacaatcataactgcaataggtaaaacccaagttaaaacatatttaaaataaccattaaagcttatccaagcaaacacccctaaggagattagtgcagccatttcaagggtgaatcttaaaagtaaattagtctgattcagtttttccaactcctctataaaaaacacccccgcaggagatgctctttctctgctttatttcagcgtataaaaacttttctgttcttcctatttagattctattgtagttttcggcgagattacctctacttttgaaaagatgataccgactgctgctgttaccaatgctccgataatagaacgatgataagtataatgaaatatgacaacttttcccctcctatccagttaattatccaaataatcaggaagttgtctacaatttgcagaatttgtcgaacgaagtaaagaatataccataaaagctgaatattgacctcgcttatcgctgggaggctttactcattgtatgaattacagtaatacactaccttcccttttgagaagacgttcctctcttatatccatttgttgcaacttagctagactcttccaataggcttccttttggcgcagctgcttctagtcgaaattgagcaacacctgaatgtttcattggaatttctgaaccatagatcgttgctgaatttgttgcaaatgcatacataggagtagtcgaatggtggttgaaaaatgaaatgaattacccacctccagtgatggcagaaaaagcgggggttttgttagagaggaatctatagacatgtgtatctagaagatttgacagcattaaaatttatacttacatcgttgggaacaggccaacaataaagcggaagaacgtagtcatttgaagtggtttggaataaaaatgattcgaatatgttcttatcattgataaacgaacaaaaaaagaacatgttttgaaaaaagattgatcaaaacatcttcttatatgttgtcatagcgtaactttttataaaaaggttgattacattttcggggcttccaaaccaaattttgcccattcttcttttgctggaccataaatacctgaaacagttaaacctgcttgtctcataagaacagtcatttgtccccgatggtggttttgatgttgaattaaaaacatcaaaagtgaaccgttaggcaattgttgtccaataaagttgatacgttcttgaagtgtatggtcagtccattgggtttttaatgcctgtacaaatgcattactggcttgatgatagctgtcagctataaactgagccgaagttggaacaggataatcttcagctggggcatggaacgttaagtctgtgtttgaggtaatgatgcgaatagcagcaacagtgtgccaggcaatacggcctagagtccaattttgtgaagttatttcttgattaagtgattcatcagtcagactatttaatagtttctgtgtagcatctgcttcgaactcccaagatttcaaaaaatggtctaaggtttgaaacacaaaaatcctcctttttattcttttgttttttcaatgtgcctataggttaattataatgcctcgtttcgttaaaaagaacaaaaattttggacaagaataatcatagtaaaatgcgtagaccttcttaaacataacgatttacgcatctttttacaaacatggtgactccttggtctccattgtcagcgagaatcaaatatcatatgaaaacaatcctatattcttattactttactgagcaataaatctcttcggtatacttagtgatgccttcatcgtaatcaggatactgatatgtaagactttctgatacagcttttgaatactttctaaataatgcatagcaagtaaataaagacttccacatttcctgatacccattcacagaatatgtagacatgagttcctcccattctttatttgaaaggtaccgtttcataaatttatagttcttccccatactaaatgaataccctttctgagatgcgatatgccaggccatcattctcaataaattaggacgtacaatttcatttaaatggtcaatggcaaaaaggatttcatttcttgctagtccttttactacgtaagtcgaaaccatccagaactcattacagcaatcatcaaattcccttgcagtcggctttttcatccagtattggcgatcatttggggtcactttatagttgatgaacgaatccttatcgagcaagaccttaaccaaaccatcgttattagcaaaataatcttctgcttcacgaattggaataagggttagatctaatttgttcccatcctcaaaaagaatgatgtatgaaaaccaattacctaattcgggaggaaaaagctccatatcttctggtttttgcatcataatgcgcttcccaaagatttcgagccactgatcattttctttaaaagaatctacatcagttacaaaatacgagatgtcataatcttggaagttgtcaggagggatatttctgtttgtacgtgacccttccaaagtgaccaatcggattctctcatcgttcaaagcaaagtccaaaaaaatgtccatcatttcctgctcacttcgcattacatgttcctccgtttcagccttaatatctaactgtaaaaccgaatattgatctgtacgtcttatagatttttttactcttgaatgtgatgtattcttctaagctttattttacatgatgttctcctatatattattcaatattaagatgcaagacatctcaaaatcagatatcaactatgacggactacatgaatattcagttttttgtagagccgccatgggacgacactatctttgacacactttaatcccccctgctttatcgacatgttaactggtatgagagattgacaaaaagaaggaaaacgatatatttaagcgaatacgagtttttgagtaaattttaaaatgacacttttttcaaaaatcatgtcttaacggggggattcggtatgaatgaatttatgaagaagttttccttaacaaaaccgattattcaagctccaatggctggcggtattacaaagccccgacttgcatctgcagtttcgaatcaaggtgctcttggcagcttagcatcggggtatcttacgccagacctgctagaacaacagataaaagaaatgtttgagctgacagacgctccttttcaaattaatgtgtttgttccgcttggtctagaaatgccaccaaaagatcagattaaaaagtggaaagaaaacataccgttagctaatcaagtaaatcaattcacatctgtacaagaagagtgggatgacttctatcaaaaaattgatctaattttaaaatacaaggttaaggcttgctcattcacttttgatctgccgcctgaagacgcagtaaaggagctaaaaaccgctggatgctgtttaataggaaccgcttcaacagtagaagaagcattgttaatggaagaacggggaatggatatagtagtccttcaaggaagtgaagccggtggacatcgcggagcatttttaccttccaaaggtgaatctgccgtaggtttaatggctctgattccacaagcagcagatgcactgagcgtacctgtcatagctgctgggggaataatagaccacagaggagtaaaagcagctttaaccctcggagcccaaggcgttcaaatcggttctgcctttttaatttgtcacgagagtaacgcacatccagtgcataaacagaaaatactagaagcaaacgaagcagatacaaagcttacgacattattttcaggtaaagaggccagaggaatcgtaaataaatggatggaagaaaaagaacagtttgagacacaaacccttccgtacccttatcaaaatacactaacgaaggcaatgagacagaaggcttcacttcaaaataaccatgatcagatgtctttatgggcaggtcaagggatacggtcattgactgaggaaatttcggttaagcagcttttaaatcagctttgccaagaggatataaaaatataggcgcacctcattgatagagcaaaaagcaaacttcgacaggcagtttgcttttttttcgtaatttcatcccctgactttggaaatttaaatactcctacattttcaaagctaattgaatcgggttatcaatcatcccactgatacggtgcgatcttgatgatttcaccacaatacatcaccaacatttcgatcttatctccccttctccagttttgctccctattcgaaaaatcgatagctcccatattaaattcgaatagtaaaatggttctttttcgtttgattcagatgatataaagtcatatgataaaaaaagaatgagacagaaagcgtgagaagtgatgaaaataggattttttgattcaggaattggtggcatgactgtattgtatgaggccataaaagttcttccttatgaagattacattttttatgcagatacgttaaacgttccatacggtgaaaaatcaaagattaaagttaaagaatatattttcaatgcagctgaatttctggccagtcaaaatatcaaagctctggttattgcgtgtaatacagctactagcattgcgatagaggatcttcggagaaacttcgactttccgataatcggaatcgaacccgctgtaaagcctgctataaataaatgtacagaggaaagaaaaagagttctggtagttgctactaatttgacgcttaaagaagagaaatttcataatctagttaaagaaattgatcaccatgaccttgttgattgcttagctcttccaggactagttgaatttgctgagaactttgattttagtgaagacaaaatcattaaatatctaaagaacgaactatcttcttttgatctgaaacaatatggaacgattgtgttaggatgcactcattttccgtttttcaaaaacagttttgaaaaactgtttgggataaaagttgatatgatttcaggcagtgtcggtactgcaaaacagttgaaaaaagttcttgcagatcgtaatcagcttggtaaaggctcgggctcaatcacctttttcaattctggccataaaattgtagaccaagaagtcatatcaaagtacaaaagattgtttgaaatattagatgaaaatcaaaggagtcatgttggacattgaatgtaaggggctctggttataaacaatttttcagtaaattcacaaaagagagaagtatgaattcgggtttgttatccaatgtaaatgaaaaagacagtctcatgaagaaaaacatgaactaagaagcgggcttaaaaagcccactttttttctaacaaacaattgagttatgcacaaatatctgattacagtgttttcgctctttcccctcttatttctaccccatctctatagcttttctatttcaataaaacacaagtctcgattgaaaagttatcgtaacatttacacttcacaggacatttttcgagattagaaatcgaccgtttgccagatacacaaagtcataatgtgtaaattctgtgtctatttgcatgtttattatggaattattttcataatgttttataatacaagatgatagcgttttctaattataatgatagggggaaataatgatgatgaaaaaaggactgctcgcgggtgcgcttacggcaactgtgctttttggcacatgtgcagtagatgtgccgggtattattagtccaaaaaccgcagaagctgcatcacagctaactgatggaatcggcggaagggcttacttgaacagcactggtgccatttttgttacgaaaatccagcttcctagctccattcaggtttcaaatgggacagcctacatctactctggctttagcgggggcacagaatccgatatcgggcttcagtacagtgataaatataatgtatggaaaccatatatgaaagtcggttcaaaaggacaggatcaggttcagtacctcgaaggaggaagccaattcacgaatacgaaaggcttccgtcccggcagcaccgtacaacttaccatctacaaaaaccttaacggcaatacacgcgctacatactggggcacaaacaatgcgggatacaacggccgtctcatttcagagatcagcaaaacaaatgtcggctccatctccaaatggaaagcgctcgctacagttgcaacaacaggttcacgccaatctatcaaatcaaacttttcaacatcttttacaaacatcaccatcgacaacaaagcaataacacctgtaattgatacacaagacttcgctaaagtaacagtctcaggcaacagtgtcagtttatccgttgtgaaaaattaaaacatgttaaacatacaatgcgttaggctattgagaagctctcgatagtcttaaagggggcttaacatgccccttttttcatttcaatttaactttcagttagcttcggtgcatgccgtctatccccgtcttttatctgggtgaagtaaggagcagctcgccccttctgagcctgttccatttgctcaacgcaaaaggtgtgcattactgtcttaaaaatgttaaaacaaatggcagatggtgcactttatttttagatgaggcatgcttacgctcgatatgcaagtcaaatgattaagggtctgcaagagagagaagttttgggtgtactttcataaaagagggatgtcttcatatagctcgattgcaccaggaacattaaccagcgattggccgagaacaacacatcactttgaaacggattcattccaaaataataagtatgatcaataactaataaagatcagttagcagtccagccttaaaaatatttttacatcaagtaaactagcatcactatcgaataagctcgatctgcatatcatgtactatcctcttttaaggaaggtgatgttatgaggtcatttccattaattgtagttctattcatcctattaatcatcgttgggacatctttctttggtggctattaagaacacaccttacctcatatccatcagacgccataagaaatctttatggtgtctgttttttattagatttaaacaaaaccattaaagtggggccatgcaaacacacctatggagattactgccacgacttctttgtgagggaaatattcttccctttatggactattgtcgatcaaaagagaaagttgaaatacctttttatggtgagatgaatcgaggcttagacatataaaaaaccgcaaagctttcttgaagaagctttgcggtctttgggtctcttctttgcttcatataagccaatagatttcaagcgtaatccactgccatacatccaatgattttttattttgaaataggtttcttctactcttcctgtgagatgactcaaggtatgccacgtcacaataatgtggcggatcctgagtggtctcaatcagttttttccccattctatcaattctccacagaaaaaatggctatggcagaacaactttcatagagtaatcatcatttaatgagccatcatctcatgggcaatatcgtgtccatccatttttgacgggtagtaggtaggccaatttttgacttcatcaagtaaagcttcacggtcgtccccccaatagagatgataatgactagctttagtcgggtaaatactatgatcactaaactgaatatactgaggcagctcttctgcttttttagctagtttgaatatgtatcttacccctctattgcccgcatcataggtgagaatttcgtacccgtcatacgtatacttaccagaatattcttttccatttttgaagaacgttacagtatctttctggattacaatacggtcaacatctgtttgatagccttttttataatactctttatattcttcagctgtcttgccgccttcgtgttctgatttatatgaaaacacttcgtcaagagtaccatcttgcaggtatggatatacagattgccaatctccttcccaatcagaaagtaagcgatcctttacttggctgtttttaaaatagccttcatatattttttctgtttcttcatcatgcgcatgactatgatcgtgagaatgttcttgtgtatgactgtcagatgtttgctcttgcgttttggaagagtcttcttcaactgctgaggatgatgttgtttgattagactcacctgcagaagaaccggaagtctgacatcctgccaatacgagtaatgaaccaatcgttaatatgcctagccgctttgaaaataaaatgttcattccaacactcctttttattaaatcgaaaacattacgatttatattatacatacatctcttgcaaacatcaaagggaaaatgctcttcatgcggatggactattttaaaggaataactgactttgttcatcagttattcctttaaaatacgaaagtctacgatatttccatatcgatccgcttcaatattacagcacccctcaagcagctgttttaattttccccgtccgcgttgtacccttgattttgctcctgagtaagaaatgccgagcttttcactcaactctttctgtgataacccctgaaattcagttaactcgagcgcctctcgatacttttcaggcaaccgtttgatggtcgatcgaatacacacagttgcttccttggtgaaattttcttcctctgcacggttattaaaatgtagatcatcaggcaatatttcgcttgttttttttgtacggtaaaaatcaataatcgtatttctagtgatccgataaatccagctgtcgatcttttgttcatcgatcagatttgggagatgcacttgtattttcataaatacgatttgcaagaggtcatcaacgatagattgatcgttaaccctttgtgaaatatatgtttttaacggctgatgaaattgatcccatagatcctctatattcatttgaaaaaacctcctataattttgcgtctgctttacatttgcttcgtctttttaatcgtaacaaagagcgaaacaattgttgaatcaattgtattgcagctgttgcaaaaaataatgataaaggagaggtttgttgtggagtatacctatttagggagaacaggattgcgggtgagccgtttatgtttaggcacgatgaattttggagttgatacagacgaaaagactgcgttccgtatcatggatgaagcgcttgataacggcatccaattttttgatactgccaatatttacggctggggcaaaaacgcaggattgacagagagcatcattggaaaatggtttgcacaaggaggacagcgccgcgagaaagttgttctggcgacaaaagtatatgaaccgatttctgatccgaatgacgggccaaatgatatgaggggcttgtctctatacaaaatcagacgtcacctggaaggatcactgaagcggcttcagacagatcatatcgaattgtaccaaatgcatcatatcgataggcggacaccgtgggatgagatatgggaagcttttgagactcaggttcgctccggcaaagtagactatattggatccagtaattttgcaggctggcatttagttaaagcgcaagctgaagctgaaaaacggcgattcatgggactcgtcactgaacagcataagtatagtttattagaacgaacagctgagatggaagtgctgccggctgcacgggatcttggtttaggagtagtggcgtggagtccccttgcaggagggcttcttggcgggaaggcattgaaaagcaatgccggaactcgtacagcaaaaagagcagatttaattgaaaaacatcgtttgcaactcgagaaattttcagatttatgcaaagaactaggagaaaaagaagcaaatgtggctttggcatgggtgctggcaaatccagttttaactgcgccgatcatcggaccccgaacggttgagcagctgcgtgatacgataaaagccgttgaaatcagtctggataaggagattctccgcatgttaaatgatatctttcccggacctggaggagagacacctgaggcatacgcctggtgatacattcattactcaatactgacatttttcttaaatatttatactgaactatcatattaggaaagacaagagcttgtttgtctcttgtcttttccacatcatgttgaaaatgctggctaaacatcgacaaaaatgctgccgcttctaaaaaagaaccctaaacaatagagtaactggaaagacaactggcttgatcagcttgggacccctttcagctgtatttaaatcaatcaaactaatgattcattggcagtctaaatattattattgtttgtttacaaaatagtaatagcccctgtaatgattgctaacaacgtaataactaatgatgtaattacagcccacttaacggcaaacctttgaaatgaccccaagtccattttaagcatacttactaacagtagtgttgacgcaactaatggactcatcagatgaaccggctgccccattatagaagccctcgcaatttctactggttctataccatatgctgaggcagcttctgcaaagataggtaccataccaaagtaatatgcatcatttgataaaacaaaagtaaacggaatactagtgagtgctacaataacggggaaaaaccctcccattgatgagggaataacggatattaatgatcctgctatggcatccaccatctttgtcccggataatataccagcaaatactcctgctgaaaataccaataatactacagttatggcattaccagaatgctcggcgattcgctccttctgcatttttacattcggataatttatagtaagggcaagaacaaaaccaattaaaaataaaactgacggatgcttagttccaagcacaataaacaccatgatacttataacgaggaataaattaagatatattaagcgtggccttttcaattgctcgctctccaaactagcagccatataagattgagagctgtcctttgttatatgtctaggctctaattgaacgatgcctattcgattcctctctttccttcccattagaaaagccagaaatatcacacaagcaatacctccaagcatggtcggaagtaatggcacaaaaaaatctgaaggatccaaacccagcactgaaatcgctcttgtagctggtccgccccatggagtcattccgctaacgatactcaacgacagcattgctaatgtcgccataaccatgggattcataccaattcttttatacaaaggtaacattgctgagactgttatcatataggttgttgtaccgtccccatctaaagcgataagcattgccaagacggcagaccctatcgctattttcacagggtctccctttactatagataaaattttttctattagcggatcaaataaacctgcatcaattaaaattccgaaaaaaagaatagcaaacaatagcaatgccgctgaacttgcaactgtttgaattccttctaaaatcatgtcgccaatacccttaccaaaacctccaataagagcaaaaacaatgggagtgatggtcaaggcaacaataggcgagactttctttgtcattattaatattgtaaaaacagttaccatcgaaaaacctaaaatagtaagcatattacacctccaagaatgcgctttcaaatgacttttgattaacatatcttatacggtgtaataagttaaataaatatttttttactgtgtttcaaaaaaaattctatcataactttaaatggttaccatttgttcaccctttaaaaaatcaatgaatgctttaacgagtttgattcctaatgatttttgatcgtacattagccaagtatctctcattagaggcttacccttagcattatacagttccattgtgtacaaatgatcagattcctgcaggcaaatttctggtgctatggagtaaccaagaccatgctttaccatctctttgcaagtctcttgtcgatccacttccattgcaataatgggggcttgttttagattcgtatgcatccaatcttctataatcgtttttaaagaagcatccgttttatatttgataaaaggtaaaaaaggaagctgctctatcgttattggtttttttgagatgatatgtaatttttcccgtgtcagccgttcctccacccctttccagcgatggcttcctctcagtataccgacttgtacaataccagcatctaataatttcatgacatctgtgctccagcctgtttgtacactatattggacattaggatacatagtggaaaattcccttaataacttagggagcttatattgagcgaaattgcttgatacccccagccttagatgtccttgcacctctttgcttagattagagatatgatctttggtatcttgaagttcctgtagcattcttcttgcataagcaaccaagtgttctccttccgcagtaaaggtaattcctttatgccttttggtgaataattcaattccgaaaatctcctcaatcttattcaaccgataagtgatggaaggctgtgatgtaaataatcgttctgctgtttttgttacactttgttcttcgtgaagaattttcaataaaatccaatctttctcatccattttcatcttcctttctagtccttctttcacaattataaaagtttttttatcgaatattaagaaaacttatattttatttttatttttttaccttctacactaaaaaacataaaaaatactacctttaagatgaggatgatgacgatggtcaagacgaatgtaacaatcatgagaggcggaacaagcaaaggcgtttttttccacgaatcagccatgcctaacaataaaaacgaatgggagccctttttgcttgatgtcatgggaagtcctgataaaagacaaatagatggtttgggtggcggtaattcccttactagtaaagtggcaataataaagaaagcatatacttcggatattgatgttcactatactttcggtcaagtcagcatttcggaagaaaaggtggactttaaggggaactgcggaaatatctccgctgctgttggtccatttgctatcgaagaaggacttgtaaaagcgacagaaccaatgactgcggtaaggatcctgaataccaatacgaataaaatgatcattgcggaagtggaagtggaagacggtcaggtcaaatatgacggagatgttacgatatctggagtgcctggatctggatctccaatctatttaaactttcatgatgccgctggttcagttaccggtcatttattgcctactggaaatagttcggagtttttagatacaagtcaaggccaaatagaggtgtctattatcgactatgcaaatccattagtttttgtggaagccagcagtatcggcctggagggaacggaacttgcagaagaatttactgatttacagttggctcaatttgaagaattaagatccattgcggcagagaaatgcggctttgccagtcgattttcagctacaaagttatcgccggctgtccccaaactggctatagtagcaaaaccagagaaatataaagatagtacaggtgcttggcattcaagcgttgagatggacttacacatcaggatgatgtccatgcaaaagccacatcaagcactggctgtcactggagcgatatgtacaacaagagccctttcagtggaaggtgcaatccctgcaagaatagcaaaaaaccactctacaaaggttcggctagctcattcttctggtattattgaaacaatggtggagcccactggtataaagatcgtccgtaccgcacgacgtattatggacggaacagtttatacgcatggagactatcaaatgatgtagatggactgtgcaaaaagcctccccctttccatcgttaatagatggattgaatgcgccttcttgcacagatccattgtaatcttgcatggctttaaaaaagcctctatattgtattttatgaaatcgccaaggtcctttcatgtatctgcctcaagcatgacataatcattatagagaaaattgaatactttttactgcaaataaaaagataccaacatcattggtatcttttagattgagttcatctgcagcggtttcttttcctcactgcttatttgattacaaaattaccgtactcgtttgaacgaacatgaatcggtccgtttagattatagttgttctccttggcgatagagcgaagcacgtccacacgggcaactgattctctccattcgtcacgggtgtcatgattggccggattcatcagatcgtcatagcgtacgtccaagaatttattcaaccacttcttctcgtctattccgtctttaggtgatccgcccgcttttttgttcgtacgtttaatcaaggcataaaaagagtcagggtcatcaccatcgccatgctgaataaccgtatcgtacatcacagctctagccaatgctgtttttagtccggcattatccgatcgtttcatggcaggctgataatacaaatggtcatttactttgtcttgagcggcgcgaaattccttatcatttgcaagcgacttccaggcagaagcgaatcccttgagattgcttgtatcatcgctttcttccttggccagacggcgcaattcagtcagatactttttcagtttgttattcggaactgcctttgtgtatacttctactacttccaatgcatccccggtagccgttgtaaagcccgcccgtccgcatgtatagcctcgcccgtcatccaatcgctctacatatccatattggatctccgttgtgccgttttcaaagatacttgtcagctgttccgcccggcgcttttgatctttattcagtcccgccgcaaaaaccgtttcgctcatcatcagggtaaaaaacatggtgaaaacaagtaatgagatcgctgcttttttccaaaaatctgctttttgcatactgattttcattttacttcccctttctaaatattgtaaatacagactcagtatacatgatgaaactgccctattgttgaaaatacatcaatttgtaaatattttgaatctaaagtaatatagcttgaatcttactcttttcattgccaatcagccttagcccctctcactgggaaggtccctttcatactgcttcaactttcattaacaagatgccataggctttactctattttataatggaagtgatcatcgaaaatcgttagggaggtgatgtaaatggcaagcaagatgagaatgccagattccgcaacgtcccatgcaaagcctactattgggaaggcgatactttgcatggggtagactttctaaaagatcgcccaagtaagcttttctgatatagtggctttgcaccttatttgacataaaaaaataaggagctggcagaaatggcatatgtaaaagcaaccgctattttacctgaaaagctgatatcggaaattcaaaagtatgttcaaggaaaaacaatatatatccctaaacctgaatcctctcatcaaaaatggggtgcgtgttcaggaacaagaaagctgatcgatgacagaaacgcttctattaaaaaagcatttaaaaacggcaaaaccattcatcaattatctgatgaatatcacctctctattgaaacaataaaaaaaattgtctactctaaataaacaaaacggaagcactgataaaaaataatcagtgctttttatatggcgagtttgtttcttagttatttcctgcatatgataccattggccaattgtgtaaagttaagggagatgagaagaaaggaaggtcctacaaatgacgataaacaatggaacgttgcaagtacccggcgcgaacatccactatcaggtgcgtggctcaggtccaatcattcttttggtccacggcggaggcggtgatgccgacaagttccatcatgttgccaatcatctggctaactggtactcggttgttacttacgatcgccgcggccattcccgcagcaatctcgccaatcagattgaggattaccgtgtggaaacacacagtgacgatgctcaccgtcttctagccaaaatcaccaataagccggcctatgtatttggaagcagctccggggctgttatcgggcttgatctgtgcatacgccatcccgaacaagtacatgtcatgatcccacacgaaccaatcttattgcagcttctgcatggaaatgagctgaaacaagccgagcaattcatggaagaccttaagaaaaatcatcaaagtgaagtcattaagttcatgtcaagattagagacagacgaacaatcaaaggctgtgctgacaaagcggcttctcggcaattcaacgtatttcactgagtatgaaattcaaggaattctcagctatacattagatttcgaagcattaaaaactgtgtttacatcttcaccgatgaagatactcccagctggcggaagtgcttctcgggagctttttccttatcgttgcgcgaacgccctagcggaacaattggaaacagaatttgttgaattccccggaaatcatacggggtacacaatgtaccataaagaattttctgagaggttacacgacatgttagaaaaagaaaataaacatacgtgttcaaaataggacaggtaaaactaactatggaattggagaagatttcacgaagcgtaaaaagaacttttcactaacgagaacgcaatgtgagatgtttaaccaaagtgatattagggatttcatcgaaaaataggtttgtacattacgttctcctattgattatttcctatcttaattccgtattttataccattagatacaactctaaagcggctcgttattttgtcctcaacaacaaccagtgtctaacatcatgaatctcttttgaaaatcaccacaaatgcaggtatggaagacttcatcgcagcaaaaaccataccaactattgttgttggtatggttcgtcctagataggcccttaagaagagattctattgtacggagtatttagctaattgcatttgtaaccgacagggccgtctgaacctgtgtacacatatgtgtcagacacatatccaatattcacgacaccccgggaatctttccactggatttggtcccagatattactcgttccatacttccctgtaacagtcgttccataagcgtaacaataataaggaacacgggagccactcggaatggaaagcataataggataatttgtaccaggaccgctgcgcatattgacaggcgcaccgctgcttgttgagacagtaaagtactgcacggcaagtgcctgactggaaaaaatgaataaagatgcaatcatcacggttaacatactcagcattttcagtttagtcaatgtcatccctctttcttcaattccttcattttaagaaacgatagaacaatgctaccagctgcatttaggaacaaccggaccgtctgagcctgtatacatatatgtatcagagacaaatccaggaacgatctccccgctggcaagcgtccgctctgtgtaattccaaatgttactcgttccatactttccagttacagttgtaccggttttgtagcaatagatcgggatgcgggttccgctcggaatagtcgttacaattccccaacttgtacctgggccgctgcgcatattgacaggagcaccgctgcttgttgaaaccgtataatactgagctgcaagtgcatggctagaaaaaatgaacacagatgcaatcatcaccgttagcatacttagcctctttagcttattcaccttataccctccccttataaatgccgtacgtttgactttcttacatccagttaaggatttactttcagataccatgccccctcccctctcatatatttatcaatgtaccataaactagatctttcaaaagtggaattattcctatgttttcgacaattaaggatacaaaataaatggtagtcaggcttgatattgatggtgtgttacatttggcatttgtccagtcggtaatcacgattgacaatcaggaaaaaggacatggatcaagcggtttcgtgtccaccaattaactcaatcagtgtacttctgccttgtatccacgcttcttctcgattcatagatactccacctttttcaccaatcaaaaacggacaccaaacaaatcagcgtaaatgctgcaagttcagtgtccgcaacctattatgactttgctttcttttaccagggcgtataaaaatgattaggtacgttatcaaacgttatattctatgattttgcgagtcgaaaaatcataacattttatatatttcaatcagattatgatctggatctctgaagtgagcaactcgggcactccattccttgcgatcatgcggtttatttacacatttaactcctttttcgtgtaaatcgtcatatgttttatcaacatcttctaccttaaactgaagcaaaaattttgattgagcttctccttccaacgattttttttcctctccaacgatttcagccatcgtttcacgagataaaagctctattttcgtttccccattatcaaagagtgcatattccatttcattctctaaccaacttattggaagtcctaatgaatctttgtaaaactccacgcttttcttaaaatcattcaccaacagtctaatttgtaacagcttcatatcgagtgcctcctataaaaccatactttttactggtcatccaatttaatgatacaaaaggaaacctgacagcactatgtcaagtttccataaataaatttcctacttcacctttatttcagatttaagtgcagtttattccatgtcataagaaatgtacgctaacgagcaaaaacagcgattcttaaaacaaaaaatgataccgagtgtattttctgtatgcttcaacttcatttcgggaaatgtaacgttgataaaggaggttacatcaatatggatcatcaaacattggcagctcacgaggctgttgacttacatgaaatcgtgaactttaaaacactttgtatagcgaaatcaaagttaatgcaaggacttgtgtttgaccaagaactgaaggacttgatgcaaaaagatgtacagcaatccattcaagaccttactgaattacaagcggtttatgagcgtgcctcatttcaggcccctgtccctcaaagccgcccaacgccaatcatcaattgaaaggaaggtaagcctctttgaataatgatcatttagaccccattaattcgctgaatgtgcctgaactagcagacactacattcgcgatggattttcttatacgagctaaggaaggcgtaaggaatactgctgtagctttgacagaaaccgcttcaccagatgtaagagccttgctgcggaaacagctgatgcaaggaattgcaatgcaccaagagattacggaactgatgatcagcaaaaaatggttccatccatatgagctgagcgaacagtataagctggatcagctctctgcaaaaaacacgatcatggtcggcaatatgaacctcttccctgatgaaacaaatcgtaaagggatgtttgaccggacacctgatgaacactaacactggaggttttacagcatgaaggcagtaacgtatcaaggcattaaaaatgttgttgtcaaagatgtccccgatccaaagattgaaaaatccgatgacatgattatcaaagtcaccagtacagccatttgcggatcagatttacatttaatccatggattcattccgaatatgcaagaagactatgtcatcggccatgaaccgatgggaatcgtcgaagaagttggttctggggtgactaaactaaaaaagggagatcgggtaattattccctttaatatagcatgcggggaatgctttttttgtaaaaaccagctggaaagccaatgtgatcagtctaatgacaatggggaaatgggtgcttatttcggctattcagggcaaactggcggttatccaggcgggcaagctgaatatttaagagtgccgtttgcgaattttacccattttaaaatccctgaatcttgtgaggaacccgatgagaaattaagcgtgattgccgatgccatgaccaccggcttttggagtgtggacaatgccggcgtaaaaaaaggcgatacagttatcgttctcggctgcggaccagtcggcctgtttgctcaaaagttttgttggctaaaaggcgcaaaacgcgtcatagcagtagactatgtaaactatcgcttacagcatgcgaaacgtacaaacaaagtagaaatcgttaattttgaagaccatgagaatacagggaattatttaaaggaaatcacgaaaggcggagcggatgtagtcattgacgctgttgggatggatggtaaaatgagcgatctcgagttccttgccagcggcttaaagcttcatggcggaacgatgagtgcattggtcattgcttcccaagctgttcgcaaaggaggaaccatacaaattacaggtgtgtatggaggcagatataacggttttccgttaggagatattatgcagcgaaacgtcaatatacgctctggacaggctcctgtgatccactatatgccgtacatgtttgaactagtatcgacaggcaaaattgatccgggagatgttgtcagccatgtcctgccgcttagtgaagccaagcatggctatgacatttttgattcaaaaatggatgattgtatcaaagttgtgttaaagccttaaaaaacggaggttacagaaatggaatacgccttacacgaagtgcttgaggttcaggaaatgactgcatttaagacactttgtttgacgaaatctaaaacaatgaaagcactggtatctgatccgaagctgaaagaaatcatgcagcaagatgttgatatcaccacacgccagctgcaggaatttgcctctattttatctaatgcaaagcacgaatgaggagatgaataaatcatgaatcctatcatagaatatctgactggcatgaatgttctaacagaccaaatcattgctatggacttattaatttcagcaaagaacggagtcagaaattatgcgatggcagccactgaagccggaacgcctgaagtaaaagaggtccttatccgccatttggaagaagcactcgatatgcacgaacaactctcaagctatatgatggaaaaaggctggtaccatccttggaaccctgacgaacaagtcaagctgaatttaaaaaatattgatacagccattcaattgccaaccctttaacatacaatgactgatttgctgaggaacagtattgattggccacaactgttcctcagcttcaaaatgagcactgtttgttcgggtcctatgaccgtaaatagattaaccgcttttctccatctgatctccgataatgtttgcaaattctccaatccaaataaggaatcgtaaccacctctttttatgcgatctcttgatggagaaaacaggccagaaacaaaatccttcgtttttgacctgccctcttcacacgcaaagaatgctaccttctttgctccactgatccgtgaagactttccgttttaggcctgcttttgagctttgcctcattttcacgcaatttcccatcataatctttaatttttgtgtctaatctcttaattgtttcatcaatttctttccgcttctctatcagccgctgtcgttcgtcagccaggatattttttcgagcttctaccgtacagtcaccttcggtaaataatgttgtatattcaattagcgcttctatcgatagtcccgcatttcgcatgcatttaatgaattcaatccatttgatatcttcttcatcatagtcgcgaatgccgctgtcttttcgttttacaggcgggattaatcctacacgttcgtaatatctgagtgttgcggctgtcaggccaaactgctttgccacctgagcaatattcatgatcttcacctctctatcctgcatgttgtgaaggtaacacttaaagttaactttaagtcaagctcaagacaagtggttagctgctgaatctgggtttatatattcgggacttgccttaaagcacactttaagctctatacttctccatgcaataaaaacagtgtagatggagggattgctgaatggcaaataaacaaactgccggaagagaacaaaccaaagtttgcttaacttcatgatgatgttctattcggtgacatttgggaaagagaggaagaacttccccccgagatcgcagcataattacagtttctacgttaattgctgactgtatctcaacttataaatcaggttcattttaaatgttattttaaaaaaacccttgccttaaagcagactttaaggtttatcgttatgttgaagacaccataaaacataaataagtgcatgtttttttacaacacttatgatgaagaaagggaaggttcatatgtgtaatcaacatcaaacccgtgtattaagcgtgtcacatgcaaaagccaaatttgaacaaacgacgattgagcgaagaggattacggccgcacgatgtcttaatcgatattaaattcagcggtatttgccattcagacattcatagtgcttttgatgaatggggcggtggcatcttcccaatggtgcctggacatgaaatagccggtgtcgtaacagccgttggagcagaagtcaccaagtttgctgtcggagaccgcgttggtgtcggctgttttgttgactcttgcggagaatgcgaatactgtctcaacggagaggaacaattctgcacgaagggtgttgttcaaacgtataactcagtagactacgacggaaaccccacttatggcgggtacagccaaaaaatcgttgtcactgacagatttgttgttcgcataccagatcgtttggaaatggatgttgccagtccgctgttgtgtgcaggtatcaccacgtattccccgctgaaacactggaatgttggccctggtaaaaaagttgcgattgtaggcgtgggtggccttggacatttggcgattcaatttgcacatgcgatgggtgcagaagtaaccgttctgagccgttccatgaataagaaagaggaagctctggaactcggtgcaaatcattactttgcaacaagtgacccagctacattcactgcattggccgggcgttttgacgtgatcttaaatacggtatcggcaaatctcgatgtagatgcctatttatcaatgcttcgtatagacgggacacttgtaaacgttggagctcctgccaagccggacacatacagtgtgttttccctaatcatggggcgccgcagcattgcaggttctctagtcggcggaattcaagaaactcaagagatgctggatttcgcagctgagcatggcatcgaacctaaaatcgaagtcatcggagctgaccaagtggacgaagcatacgaacgtatcctccgaagcgatgtccgttatcgatttgtgattgatatttccacattgtaataggttattccttatatggggctgacccgcttttattgaaactcacgaaaaacgatctcgttaagcaaatattttgaaggccggtcaatcttcctgttattctatgaatagagagttattaggagggttttttatgagcaaaaaaatcgcagttcttgttacagaccaattcgaagacatcgaatatacaagtccagtaaaagcatacgaagaagctggctacagtgttgtggctatcgatttggaagccggcaaagaagttaccggtaagcatggcgagaaagtaaagattgacaaagccatctctgatgtggatgcaagtgactttgatgcacttttaattcctggaggattctctccggatttgcttcgtgcagatgaccgtccgggtgaattcgcaaaagcatttatcgaaaacaaaaaacctgttttcgcaatttgccacggcccgcaagtactgattgatacggatcttctaaaaggcaaagatatcacaggctaccgcagcatccgcaaagatttaatcaatgccggtgcaaactacaaagatgcagaagtagtcgtcagccacaacattgtcacaagcagaacacctgatgatttggaagcatttaaccgcgaatctttaaacttgttaaaataacgagaaggcacagactgttcgggtctgtgccttttttaaaattaagactccttctttacattctgaaagacagcagtcgcgtcccacacattcaagccaaattgaccttctgaaaatgcggaatcatttgcatcaatcacaaggcgatcatctaaatagattttaaagcgatcgccctcggcctctgttttcagatgatacttttgattaacgtctatcggtgttttgtattcagcaatgacagaagcaacaccgttctcaaatttaaagaatttcactagatcatgctttgcatccacattggcaaggtaaccgtttttggcatctttgtcagagcgaaacattagtgctcctgcccctcttccgtttccatccttaatggtgatatcagattcataagtgaagtctgacccggatgctgaagacaagataaaggaatctccgtccgacctcccttgtttcccctcaattgtgtcggcccatgtgccatttacagtcgtccagccagtcatattggacataaaaggtgacgttccccataccttttttaaagggtgtatggttaaagattttacctttacgccgccatttgcagcatataattcaagccctttgcttgatcggtctgggagaataatatccgttatgacctgctttccgtcattcccaaatacttcaaccgaggagcggtcaacaaaaatgcgcatcttaaccttcccatttaccggcttcaatggggctgtttcttttccggtgttaaaggccggattaaaggtattgttgcccgactcgctccggtcaacgaacaatttggcgttccttcggtcatagccgaccttcgtaaattgattttcacctgttcggaccttaaaaccaaattcagcagctgaaccagggcttactttaaattctgcatttatttcataggcatctccagattgccccgctaacacattatgacttgcaggcgatatggtcagattcttccacttcttagaggttccgcgaatggtttccagctctttcaccggtgtttggaccactctaaccccttcggtaaacgctttcaattttaactctcttggaatggacgttgcacttctccatggggatgtcggaacatcattcgcatattgccaattgctcatccaccctaaccatagccggcggctgtctgtggatggaatatcagaccaggatacagccgcataaaagtctctgccgtaatccgtccagagaactttgtttggcgggttttcatttttaaaatgagttccatcaaagtcccctacaaaatattgcatgcctgatcctcccgagaccgctccgtttccgacactgacctgcatgacccatttcttttgattcggattgccgtctaccggaagctcaaataaatccgggcattcccatactcccccgtggcttccttgatcctgtccaaattcacttgcatacgtccactgcttcagattttttgatgtataaatgaggattcggtcaccggccgcaagcaccatcacccactttttttctttctcataccaaaagacttttggatcgcgaaaatcttttttacccgggtttggaatgacagggttgccagcatacttcgtccatgttcttcctttgtcgttgctataggcaatactttgcacttgatggccttcccgatcctgtgtataaatggccacaagcggcttctctttgcctgtttgaaaaccgcttgtgttatttttatctacaactgcgcttccagaaaagatcgtgcctttttcatccggatacagcgcaacaggaaggtgttcccatgtaaccaaatctttgctgacggcatgcccccaatgcatgggcccccactgaagcccgtatggatggtattgatagaacaagtgatattccccagcataatataccattccgtttgggtcattcatccagtttgcctccggtgtgaagtggtattgaggacggtaatcctcatcatagtagcttgaatcggctgcatctgccgaaaatgccatagtcaacagcagggtgaacatgatcatgacttgaataagtctctttttcatttgttccttcgctcctctcttcatgtttgaacactttcaagagagactgctgcgcaagctggtccgtttctggcaattctcctctgtttcactgttatccgaatgatttatatatgaaaagactgctgcagtttctctctctttccttcacacaccttatgctaagaatccagcccaatacccgagaatcccgatgacaaagatgccgcaaataatgagaagtggattcacccctttgcgaagcatccatgccaccaataacgttaatccgagaggcagcgcccccggcataatgctatctagcacgttttgtaccgtttgaacatctacttttccgctttcatccttaatcctggatacaacgattggaatgttgatggtggtccatttggacacgagagcccccataacaaataacccgagaatcgaagcgccctctgtaagcttttgaatgcgattccccgctaaatcctgaagaatctccattcctttcacatagccatactttaatccgtaatattttgtgcttaatcttatggcattcagcaagaaaaagaatagcaaagggccggcaatgtttcctcctaaagcaagggaggctcctagcgcagctaagacaggacgaatcgttccccaaaaaattggatcgcctacgcccgctattggtcccatcaaaccgattttcattccgcttatcgcttttccgtcaattcctttattgttcgccatttcttcttccatggctgccgtcacgccaaatataggcgctgtcagccacggatgtgtattaaaccattccaaatgccgctgtaaggcttcgtttcttttcgctccgggaccgtacaattttttgatcgccggtatcatgacataacaatatcccattgcctgcacacgttcgaagttaaaggaaccgagtaaaaaatttgaacgaataaacatgctgaaaatttctttcttcgttaatcgtttttctttctccattttttcttccccctcatcgtttaggcatcaagatcatcatcatcgtcatcataaacagcaacactgccactgtctgatgcggccgcgactgctccgtgagcgctttgtttttgcatcacctgctggtataaaagcgccagacagagaccaagggctccaaatcccactaagttaaaatcggtaaacgccgctaataagaaaccaatatagaaaaatggctttaaataaggaatattcatcatattgatcaccatggcatacccgactaccacaataatgcctccgcctatttgcagtccttttgtaatgacatcaggaatatttcccaggaacgcctgaacagcgctgacactaattaaagcaacaatcaatgtaggaatcatgacgcgcaaagcttgaaacaccatcgcggtaatatgcataatttcaattccttttatatttcccgcttttgcatattgatcagcgcggtggatgaaaaagacagtgatcgtccgaacaaaaatcgtcagcgcctgacccgcagctgctaaagcaacagcgacagcaatcccctcgccaattccttgatcagcggtaataactaaaatggttgagatgacagaggcgatcgctgtatcaggtgccatggcaagcccgacgttcatccagccgagcgccatcagctccagtgtgcctccaagaataattcccgtttttaagtccccgagcaccaagccaaccaacgtacaggccacaagcggccggtgtgtctgcccttcatccaatacacttgcgattccggtgattgctgcaatgattaacaacaaaataatttgtaatgaagacatattctcatccccttgattattttgctacgttccgtaaaatctgtacaaaatcctcactggcatctgaaggcagctgcctcaattccagtttcacgcccttgtcacttaatgtttcaaatgcctttatatcttgttctgtgacactgactgattttgtgatttgcctgcgatgattttcaaaacgcattcccccgacgtttacggttttgatcggtacacctgcttctataagagatacaatatcggacggattttcaaacaagagcattgccgttaccccttcgtagcgcggactatgaaatgcttttgccattttagaaaccgagacggcactcgcctttacatttgaaggcgcaacagaaaggatcagcgtttttctcatttcgtcctgagcaatatcgtcggagacaacgatgattcggtcggctgcatggacttttatccaccttgtcaggatttggccgtgaataaagcggtcatcaattcttgctaacacaatgttcatcataattcatcctctcttgtatcttgattggctgtttttactttttctaaatgttcactgcacacttgaaagctttgctgactcattgcttttaagttgttcagcaaatctttgagagccagatgttctctcaggcttaatacctccagcagaatcggcaggtttacgccggctgccatatccattctttgatcctcagcaataaaggaagctgccgcgttatatggcgtccctccaaaaatatcgactaaaaaaagcacttcatgttcttccgggatatccttgagcgcctgatgatatttttcttgcagcgtttgtattccttcccctttaaaaaacggcactgcaatcaggttattttcttcaccgaatatcatccctgaagattcttttaatgctatgggaaaatctccatgaccgctgataataactgaaatcatatctattgctcctttcctgttttgtacatccatatataatgcaaggatcgtgccaacacagttgtgttaagcgttttcattgttatttcagccaatagcaatttgttgtcgaaacacttaaaacgaaaaaaataaacctgtattaaaatggtgttccatttaatacaggttcatataaaaaaactgtttttaaaacagctggccatgcacttcttcagcaaatatggcggctataaataatttttcatcatcacttatgcgaagtccgagcttttcttcataaggggctaatgttcgttctgtcacgtacaccatttccttcagctgatcattgatctcttcttcctccgagaaagcgatcggattctgcttaattaccctttcaaaggcgaaagccgtgtgcataatgactttaatcaaaaccgcattattgaaaatgacccccagctcatcttgaacggtttgcagccactccaataacatttcgatcacatggtggggattcaagaagacaaggtattttttcaggctatcctcgcaaagctccctgacaataatatttgcttcgttcaatccattgctcaaggggatgcttccttttgtaatcgcctgttgaatcagcttctctccctccccttcaattaacacttctaaagatacatgcggagcattgattttagggtctttcgttccgactgtcgcaaggatttcatactctttttcgatttcttttatgctgttggccagtttaatcgatgatacggtcaatatgtgaatcggggtatcggaggccttgtttacgatcgtggttagaatgtcttccagctttttggccgttccgctgcccgtcgtgcagatggataccaatgccttctttttgccggatgccgctggctgacgctcccacagctcgataaaatccttcgtgaccgattgatagatcgcatgcaaatttaaattcaaatagttgacctttctgacagcatccagcaccattgaagtcgtaacattgctgatcgttttgatggaaatacctgtcttttcctccagcctgctttccagcattgcaagcgaccccatgtctaccagcattaaaacaccttcaccttcatcaacctgtttcattttttctgctacgcattcaagaatgtccgaaggtgaaacagaaagtggcatatcgactgctgcaatcggcgtgctccctagcagttctgtcgcaacttcaaccatcgaactcgccgtgctgtttccatgagcagccacgatgataccgactcttttgttctcctttaacgatttgatggaatggattaacatcgttaagtagatgacttctatttcaggaatagccactttaaaatattcctgaattttatctttaaaaatcatcgccacccgatattctttcacatgagtatcacgaatttcatcagtctcctgtgtattcaaaacatcaatttgctttcctcgctttaaaaatgcgtcaatatgcatactcaagaaataaataaacttgcggtcaaatgtacaatccagctcatgttcagctatttcttttaactgttttgtcatttgaatcacgtcatcttcaacgaatgtcagcaggttgtctttttgaaaagcttgatgatgaaaaaaacttctgacatgcaaatggacatcagtcaagatgtattggttaatatcctttttggataaaccttctttcataagcgttttcactttttcctcaatcaaatgatataagttaaatgaaaggtcttcgtcaatttttgttgtttcatcttctacaatcggagagataatagttgtaatattgacatattcagaaatggctttgcttctttgcatgtttttgctgctggacatccattcttgcttgatttcatcaggcagatcgcgaacagtcagttcaataacctcatttctgtcaaggttatgcaaaaatccgtgtgcgcaaactaactggacatttgatttcagctgtccgacattcccaaatttcgcagagtgaataagcgcattatagacatcgatatgcacactcagattcttcttaatccgctctgcttctttccctaataaaaacgtcgtcagatcgactctttctttaagcgatcgttcttcaagcgaaggaatatgaatggtcattgggattcttcgcaaaaacgttttcaatagtgcagaactcggattttctgtagtcgcacaaataaacaatacgttcgatgttcgtttatgttcagattctccaagcctgttataagaaccgctgtcaataaaataaaacagcatttcttgtccctcgggagggagacggtggatttcatccataaaaagaatgcccccattggcctgttcgactaaacctgccttatcctcggcagcacctgtaaatgaaccttttttgtgtccgaataattgagaaagcaataattgagggttgttgtagtagtctgcacagttaaatgtaataaatggtgcgccggccttcaatatgtcagagtaaatggcaaactggtaaattcggttcgcaaaaagggatttaccggaaccagtcggccctaggaggagcatatgcagaccgttcggcggataaaagacagctgcttttgcctgggagatcgctttcttcaaactcccttttgcccctatcataagctctaggggattcgtggaaatgtgttgatgattttgctttgaatttccggaaaacgcctgaaggtctttcacttccatcatctctgtatcccatttcttgttgaataatttttctgctatctcgactgggatgtatcttacaggaaacgttttaattttgatgacctttttggaccggacgagattgttcaattcaaagctgacattggaccgctccattttcagctgctcggcaatctcctttgctgaattcccttgtatttttaaaagatgatctaaggttgaatcatgaaaattatgcttgagctgatggtatattttatctattcttctcacgtctatcatcctttgtccttattagataagccattaacaagaatatttcgaaaatttatagtccgcgttgagattatctgctgatacacgtttaaaaaggtctctatagcagattgacaaaactggcttttatgcgtatatgtttacatgttgaatcatttgcatctcatattagtatgatagatgctcagttctcgagggccagtccccttcaaaagtaataatcagtaaacagtttatcattctcggggaatgtaatgatgtcaaaatcatcaatgacaaaaaatgaatcttatagatcatgacaaattacccaaatataaccccttaagttcgctcacaactaaaaagacgggcactctatgtgaccgccacagtattacaatttgcaaaacttcgtcatttttgcaaagttaaggaatctgtaagcttaaaaactttatctccgatatctctcgatttgatcccccctgtaggcctcaaacatagtgggtatgcaattatacaaatcgttaccgattaaaactagcctgtcagattgtccaaatgactttcctgttttactctgctattcaggtagaatcaggagtgaaaatagagccacaagacatgtaacagcacttaaaatagttttaaaatttaaaaataaaagtatctattcttttaaatgttataatatccgataaaactttacacatctttttattactggaggaaaataaaattgataggcaattctagcaaagacaattttggccagcaacagaaattgtctagaggccttaaaaacaggcatatacaattaatggcgattggaggtgcaatcggtacaggtttatttttaggttcaggtaaatccatccattttgcaggaccatccattttatttgcttacttgatcaccggcgtattttgctttttcattatgcgttcgctcggagaactgctcttatcaaatgcgggataccactcttttgttgattttgtaagggactatttaggaaacatggcagcatttatcactgggtggacctactggttctgttggatttccctcgcgatggctgatttaacggcggtcggcatttatacgcaatattggcttcccgatgtgcctcaatggctgccgggtcttcttgcgcttattatcctgctgatcatgaaccttgccaccgttaaacttttcggagaattagaattttggtttgcattgatcaaagtcattgccatactggctctgatcgtaactggcattttcctgattgcgaaaggtttttcggcagcttccggccctgccagcctcaccaacctttggagccacggcggcatgttcccaaatggatggcatgggtttatcctatcgttccaaatggtcgtcttcgctttcgtgggtattgaacttgttggactgacagcaggtgaaacagaaaatccccaaaaagtgatccctaaagccatcaatcaaatccctgtccggattttacttttttatgttggcgcacttttcgtgattatgtgtatctatccttggaatgtgttgaatccaaacgaaagcccatttgttcaggtcttctctgcagtaggcatcgttgtggctgccagtttgatcaattttgttgtattaacatcagccgcctcagctgcaaatagcgctttattcagcacaagccgaatggtctattcacttgcaaaggatcatcacgcacctggactattaaagaaattaacttcttctaacgtgccaagcaatgcgctgttcttttcatccgtcgccattctgattggcgttagtctgaattatttaatgcccgaacaagtctttacactgattacaagtgtttctacaatatgcttcatttttatttggggcatcacggtgatttgccatttgaaatatcgaaaaacaaggcagcatgaagcgaaagcaaacaaattcaaaatgcctttttacccattatccaactatttaacacttgcatttctcgcgttcattcttgtcatattggcactggcgaatgatacacgtattgctttgtttgtcaccccggtctggtttgttttattgattattttgtataaggtgcaaacccgcagaggacataagatgaaataaaaaaaagacaagggatactcactcccttgtctttttatatgtgtcaaacactaaattaaactttggtttcaaatctcattcacttcatttaagtgttaactcaaaccagttttgatgccgaaacctactaatattattccggtaattttttgaaacactttctggaacttcgagtttttcatccatttttttgcgtaatcaataatataaacaagaaacagaaaccacaacaccgctaataaggttagaattgaagctaaaatgataagctgctggtttatatttccgttcaaattgataaattggggcatgattgtaacatacactaaaacagttttaggatttagaatgttactgagtgatccttgcataaaggaagttttataataacgtttcggagaacttgccatattttttgcttgggattgcatgtcatctaacgaaaacatacttttagcaaaaaagctttttacacctaaataaattaagtatgccgctcccaaatatttgatcgttgtgaaaagaatcactgactttgcgattaccactgataatcctaaaatggcaatcaccgtccaaaaggaaagtcctgtcgccaatccgagaatgttataacggccggctttcggaccatacctaagcgtatttttcatcacaagcatcgtatctgcccccggcatgataaccatcatggcagcgatcggtatgtatgcgagtaagctgtgcattgttctctccccctttaaaaatcccctcaatcatatagtgactacaaaagtaactacttataaaagtgtatcaatgcatttggaataaatcaatatggtttgttaaaatagcgattactaaggcagcgattgctctttatattggaggatatatgaaagaaaatatgttagacattttaaaaaacctcaattttacagaatatgaatcgaaagcgtatttggcattattgcaagaatcacctttaacaggctatgccgttgccaaaaaatccggagtgccccgttctaaaatttatgaagtcttggaaagccttgtcataaggggagatgtttttgtcagtcatggaaatacacctcagtatgttccagtccccgcaaaagaactgattaaaaaccgccggctcaaagcggaagagcattttgatcaggctgagaaatattttgaaaagttcgagcagactgctaatgaccgggaaaacatctggaatatcaccggccgcagtgaaattcttgaaaaggtgaaggcttgtattttatctgccaaaaaaagaatcctcttagaaatatggaaagaggattttgaggagatagaatcagagctaaaacaggcggcagaacaaggcgttattgtcaccattattgcgtacggagacatcgtatctgatttttccaatgtttaccttcatgatatgagcagtgaaattacagaagagtatgacggacggtggcttgtctatagcggagatgattcagaagtagtagcgggcattgtctcacttggcaatgacagccgtgctgcatggacgatgcatgtaggtttagtcatgcctattactgaagtgatcattcatgatctgtacctcatggaaattctgaaaaagcatagagagctattagaagagagcttcgggaaaaatctcatccagttgcgccgtaaattttctattcactcagatttcaaaaaacattatttggaataatgtttggcatctcttaccccaaaaacaaggcttgtacaaaacaagccttgtttttttatgcataaaccccccatccccatgctgatttacttctctcttttaaaaaatgtgattctgcgcaaactatttttcagcctgccgcgtctatcctaggtaacagcctacgatatacgtatattcaaaaaggagccctttattgcaatgaagaaaaaacaaacaacaaaagcgttgcttgtcacatgcataactgatcataagcaagatttctaccggttggctttcagttatgtgaaaaatcaagatgacgcattagatattgttcaagaatcgataaaaaaagcgctgagctcagttgaaacggtcaaaaaccctgagacgataaaaagctggttttataaaattttagtacggacagccattgactttttgcgcaaacaaaaaaagataagagtgatggacgacgaaacgatagaatttttaagcaaaggaaaggaagaccattacaaggatactgatctccatgaagcgcttgacgaattgccgtaccgctataaaaccattattattttacgtttttttgaagacctcaaattagaagaaattgcggaaattacaggagaaaacacgaataccgtcaaaacgcgcctatacagagcattgaagctgatgcgcattcagttgacgaaggaggatctttcttaatggataagagattacagcaattaagagaagaatataaaaatgttcagattcctaaagaattggatatcattgttgaaaaagcccttcagcaagaaccaaaaaagaaaagaatcgtcatgtggccgacatcagcagcaatcgctgcagctattttattcactgcacttgttaatatcaacccggacgccgctcaggctatgtccaagatccctgtcatcggcaaaatcgtcaaagcgatcacctttattgaaatcaaagaggaaaaagaccaatcaagcattgatgtcaaaacacctgctttgtccgggctttctaataaagagcttgaaaacagcattaaccagaaatacttgaaagaaagccagcagctgtataaagagtttatacagtccacatccaaaaacaaaaaagggcatctcagcatctacagtgattacgagacggtcacagacacgccagatttactctctatccggcgcaatattgaaacaacacaagcatcttcctacacacaaagccgttatattacaattgacaaaaagaatgatattttacttacattaaaaagcttattcaaagatgagcgctatatcaaagtcatcagtcaaaacatcaaagaacaaatgaaacagcaaatgaaggaagatccaaataaaatatattggctcactgacgaagatgcagaaccgttcaaaacgattcttcctgatcagacgttttacattactgaagaccataaacttgtgatctcatttgacgaatatgaagtcgcccccggctatatgggcgttacagagtttacaattccaacccgtgtcatttcaaacttgctcgtgggagaacgttatattcgataaaataaaaacatccatctaagattatggatgttttctctcttctctattcgaggtcgtaacctcgctaccaaaaacaacgagaatatttgcatactattggaggaatacccatgtatcacaagacacagcatcatcgatacattcctggacttgatggccttcgggctttcgccgtcctgtcagttatcacttatcacctaaatttcaattgggctaacggtggttttatcggagttgatatcttttttgttttatcggatatttgattacatctattctattaccggcatatggaaatgatatcaatcttgattttcgggatttttgggtgcgccgcattcggcggcttatgccagcggcttaccttatgatcttttccactgttgtgtgggtcgtattgtttgatcgagaactattacacactgtacgtggagatgcgatctcttctctcttttatatgagcaattggtggtttatttttcacaagctatcatattttgatagtttcggttccccatcacctctaaaaaacctttggtctctggcgattgaagaacaattttatatcatatggccgatgttcttagttgttggaatgtacataatgaaaagccacgccagattggctgcggtgatatcattgcttgcgctttgttcagccgtgatgatgagcgtactgtatgaacctggcggagatccgagccgcgtttactatggcacagacactcgttcgtttgaacttctcatcggatgtgccttggctttggtatggccgatgaaaaggctgtcttccaacaggctgccaagcaaactgaagcacactttgcacgccactgaattttcggcattttgtattttagtgttatgtgtctatttctcagatgaatacgagccttttctttacagaggcggaatgctattcattagcgtgactgccgcaatccttattgcatgtgtttgccatccgagcagctttttaggcaatctgctttcatggaggccgcttcggtggcttggaacgaggtcttacggaatttatctttggcactaccctgttattgtgttaagcacgccagttcaagaaatcggaaaccctgttttttggcatatcgtgctaaaggtcattgtgacatgtatacttgccgagctttcctatcattttattgagaagccgatacggacacagggatttaggtcatttttccgccgtgtttttatacatagaatcatagaatggaaaacgacatctgtcatcagcaaactgtcaattggtttcgtcattttcgctatacttatttttgcaggagggctgtctgggttagccggagagcaaaagcaccctaccaaatggacctatagctcacaagaaacaaatgctgactccagccaggcttctggggataaaaagaacgctgcagcagataaaaaacactatcctgaacaaaagacaacagaatccgatcaacgtcaaaaggaaaacaaagatagtgggcaagagactcataaaaagaaagacacgcaatctcaacagacgaaaaaaccagcagacactgcgaaagaggtgttagctataggagattccgtcatgcttgatatttcttcacacctgcgtcagtcattttcaaatgtgacgattgatggaaaggtaggaagacaaatgtctcaagctttggaactcgcaagggagtacaagtcttttaatcagccgaacaaggctgtcatcattgagcttggaaccaatggctactttacaaacagccaaatcgaacaactgcttcaatctttctcaaaagcccatatctatcttgtcaatacacgggttccccgccaatgggaaagcaaggttaatgaatctttacagcaccaggcaagcgcacatcaaaatgttacgttagttgactggcatacagaagcccttcagcatccggaatattttacccctgatggtgttcacttggttcctaaaggggcaaaagctttgactgctcttattgttcaggcgatgaaatcgtaaaaaagagatcctatacggatcacttttttactttagtttctgatcgttgattatgtcttctttcagcaaggcagcccttatgtttacatgccgtttacgtaagggtaagccaaaattgaatggagggatgataatgaaaggaaatgaagaacatgacatccaaaaagagttgaaacgatatgagctttttttcaaaaaacgatataaggttctttatacattaaacgattttatcatcggtgctatgtttctcgttggaagttttttctttttctatgaccggttaatgtcggcagggatatggctgtttgcgatcggaagtttgctactgttaatcaggccgaccattcggctgattcatgactttcattaccgtaagcatgtggaacagcaattcaagcatcaatcttcaacagatgactgatcttaaggaataagaaagaacaaaatgccaaaagcctgagttgaaaatcaaaaacaagactttcagactatttatttttgaaaataaggtaaaaagaactaaacttttgcctctgcatgccgatatgaataataaggccggcgcgatactccctataacatccttttcagtagatttcattatcgtgccggttttctcatatgcaaagcaatcccgccaatcagattggcgggattttatattttacattcctgtccaaacgtcttttacataacgtttttgatcttgcagcttttgcagccattcagctgattcttcctgacttgctcctttttcagcttcatacgccaatcgcaaagttttctctacatcaggagccatttgcgatccatcaccgcatacgtaaatatgagcccctttttcaatgagtgtcatcaatttctgcgtatcttgcttgagcaagtgctggacatatccttttggttcgttttcgacgcgcgagtagcatcggcggattgtgaccaaaccgtcctgttccgcttgatccagctcttctctgtaaaggtcgtcatggtccgggcgacggcagccgaagtataaaagtgcttcaccaagggtgcttccttccttcttcaaaaccgatcttgcctgaataaagcccctgaatggcgcaattcctgtgcccggcccgaccataatcataggcgtttcaggctcatccggcatctggaatccggactgcggggtacgaatgaaacaggctgctgcatcatctgtattcaattctgctaaataattagaggcgacaccccggtattcacctcggccgctccatgctgaggctttcacaactcctaccgtcatgctcacgatatttgcatgaactttcggtgagcttgaaatggaatagtatctcggttttagtgatggcaaaagtgctaaaaaccgttcaaacggcatttcgcaagcaggataatcctctaaaaaatcaagcatggtaagacgtcttgcaagtacctgctctttgtaaatgccatcatctaaaacgagctgttccagctctttttgatgcggcggacagactgtataagaggccagctcccgaagctgaagccttgatgccggttcctgcagctctacataggacgacaataaatccgcaactttgatcggccgatccatcggcagatgagacatatgagcgcttccgcttacttttatcacatgattggactgcaaaccgaatcggctgagaacccgctgaacaagctccctgctgttcttcggcaggattccgatatgatcgccttctttatatgttttaccagccggaatttccaattcaatatggcgggttgaacgcgtgctgtcagctgtctggagttctcgattctctaacacaatcccttcaaaggcgccatatgctttagcaaccggcgtttccgtcgcttcactgagaaaagtaatcgataatgaaggcctgtcttctttctgggctatttcgttaatgtcaaatgcgtccattgtttccttccagaagcggttttcccaagactcgcggtggctttcaaaatcatcggcggcgtcaccttccccaatctctgttaaacgcgatgccccctttgctttcatcatgtcatcaatcaggcggggaatccgctgatacgtgctggcccagctccggtttccgcagccgaataccgcataggaaacacctttcaattggccttcctcaagctctttcagccactctacaaagccggcagcattatcaggcggcgccccattataagaagccgttacaatgacgactgcccctccttcagggagcttgccgatataatcatcaagcggagccgtttcagctgtaaagcccatctggcggccttgagcagccagttcaccggctattccctcagctgtcccaagatttgaaccaaaaagaacaagtaaaggtgtgccgtgtttaggtttggtttcttttggctttgtttctgctttgatgtctgcctgttcttttctctgtacattgattgccgctgttttccgcggtttcacagtaattttaaaatcatccggcttgatcgttaatgcttctttgatttttagttcgtagccagtatggtttatcaattcaaaatgctttaatacaagaccgagaaccattgtcgcttcttgaagagcaaactgcatgccaatacaagcgcgctgtccgtttccaaacggcttatacgcatggtgagggatacttgaaggatcctcaaaccgttccggacggaaatcttccgcatccggtccccaagcgttttgatcccggtgcagttttggaattaaaacagtgactggctgccctttgctgatcggatattccccgcctagaacagtatcctccttcgcatatagagaaaaagccggagctgttggatacagtctgagggtttcatttaaaaccatccgaatgtatttgagctgctggatttgtttatattcaggcgtgtcatccgttaacacgcgatccgcttcctcctgagcttttttcagtttttccggatgtgtaagcagacaataaatcgcaaaggaaagcaaaccgcttgtcgtctcatgtccagcaattaaaaatgtgatgatttgataccttatgttttcatcatccagcgtttcacccgttactggatctttggcataaagcatgagagacaagagatccttgatgttatcatccggattcgcctttcgctccgctatcattctatcgaccagggagttcatgacttctatatccttttgaaactgcagcttcgttttcaccatcatcttatcttgcaggcccagtctttttgattgattcatcgcctcttttaaggcacggagcatactggtgataaacggatgctgtgaatcacggtaaaagctgttgaatcgatagttaaatccgcataacccaatcgtatcaagcgtcagacgtgtcatatcgtctgctacatcaatttcttcattagggtttaaccggctccatttttgaatcagctgggttgcgatatccagcatcatagaatgatagcctttcatcgctttttgactaaaactcggcagcaaaatgcggtgggctttttgccagttcggttcgtgcgtccagcttgtaaataagccatctcccccgaattcgcgcaccttttgcaagcctttgccaaggttcttgtcaaagcggctttcatcacacacttcagccacaagattgtgacccgatacaaaaacactggatactcccggaaaatcaaaacggaaaatcggccccaattcatcagctatccgccataaggattgagaaagctgttctttttcaagatgcggaagattttttaaaggtccgtatgttttgggctgaggtattgcgcttgcctgtttcattaacatctccctttcctatttttgtgatgaatgaagcttaatggcgtcccagcagcattgttccaattcagtaattaaatcagtgtccatctctatatcacctgtttgaacgagctgatatatcttgagaaacgcccctaatacaatcgcaattaacacattagagggcaggctgcgaatcacgccttccgcttttcccttattaaaatagtcatcaagcatttgagtcagattttctatcatttttttgcttgtatgatttaagtaatgagcgtcttttttggtttcaagaaaaaaaagcgcatagtcgctctctttcgtaaactgaacgagacagcaaaatacgtggtgaaagccttctctgacaggcaattctgaaacgtcttgcttcagtttttccgtaaatcgctggatgctttcttgaaacagtacgttaacgagtgtttctttgctgtcaaaataacgatagatcgttcctgtccctacatgagcacgttcagctatcataggaatagtggtagcgtcaaaacccctttccgtaaaaagtgagactgacgctttcataatcatgtcgtatttactgctggatgcggatatcatgtaatctgacaacctccgattcgtttacggaatgaatattcattccttttgttcacaaagaatgtctgccctgtctgatatcacctctttgttctttcttctgttataagtttatatgaaaaaaactttttttaatataaagtatatgcaaaaaataaaaaattaagaaaatatacccaaatcctaatacaaggatcttggatatatttcccgagaaattttttatttaacagccacaatacatagacaggaagcacgcctgataacagaaagatccctgaaatgctggtctttcagcagttgaatatacgttttctctttttcaccggtatttgtgtcaatactgatataaaaccggccgtcaatttgaagcaccctgtaaatttctcttaatgcaagcctaatatcggtgcagctttgaaccgtatgtaaagaaaagactttattaaaggtacggtcatcaaagggaatgtcctctggatagccatgaaaaacctccccgttccccatgttctttcgattcgcacgtgatatctgtcttacctttcgctttgaaggatcaatgctttttaggcttcccttttctagtttcttggttatgcttttaaagacagtgccatttccaattccaatttctaaaattctgtcatttccttgtatatctatagagtcaatcatcatatgctcaattgttttggttagcttatatttccgagaaaataatttccaaaaattcgatcgtttatagagtctattttctagcattttaaacacctgcttttggtttcctatgtttatttattatattcaaaaaataaacatcatcttcattctaaaagtgaaggaaggtaccaactagacggcaatgtattgaaaaatgtttcaatagaactaaactttttcatttttttccgcaaaaaaagcagaaaacaaaatgttttctgccctctttctaatgccaatgataagggaatacatacagcctttgctgctgcattgccatcagcctctgctgtcggaatggatttccataaccatgtttgaaggaatgcggcatggacgcataaccatggccaatcgacggcagccttttttgataatcgttcatcatgccatcacctgcctcacagtaacgttgatttattgtatgcaggcaggcattttcttgacagtcatatcgctaaacttggtccttctccattgtataatgcatcaataattccattctaagcatatgccattcccccttcagtttttttcgttgcttttagcgccagtttgttaaataaagatgctttaactgagactctttcatttcatcataaatctgctcaatctgctgttctcgttcgaattcttccaggcttttaaaccgtttttttatcgttaacgttaaaaagaataggttaatcgtcatatcgctcaccccctttcaaagtccgcatcaagcgaaataacccgcggcacaccccttctgccgcgggcaaataaaaaccgcagacaaaagaagacaccaatgcctctactgcctgcggggagttgcgtatgtccgactattccgaatttaatgcgtgcgataagcatcggttaaggaaggacacgaactcttccacaggctgaataaaccatgaacttttacatgtgtatcacgtacaggttgacgtcgttgtctcattgtcattttggttcagcctcctttgctttttttcttactttgtaagtatatccaccaaattccattttgtaaacatctttttctaaaaatggacggaaattgtgcaaatcatcgaatggatttgcccgttggtcatgacacctgcttcatttcttttctggagcggtctttcttatgatatgcaataaaataaatgagaccgacaaatacagctccgccgatgacattaccgataaaagccggaatgatgtttccgatgaactgcccccacgtgaatgagcctgcaaaaatggcagcaggaatcacaaacatgttggcgacaacgtgctgaaatccgatagccacaaaagccatgattgggaaccagatgccaaggatttttcctgctgcgtcttgggcgccgaaagaaagccacactgcaagacatacaagccagttacagccgatggcggaaatgagaaccttgccaaagctcatatcaagctttccttgggcaacggcaatcgttttttctaaataaggacctgtttcagtcaatccaaccaaatgcccgaaaaagtacgcaacaaacaatgcgccgattaagttcataattgtgacgattccccagttaatcgctaactcttttactgatatttttctcgaaaataacgccattgcaactgacatcatattgcctgtgatcagttcagcgccagcgagtacgacaaggatcaggccgactggaaatactgctgcaccaatcaaactggacaggctcccccattctttcggaagatcgccgattaccctgatatcaagcaaatacccaagcgcgataaatgcaccgcctaaaaaccccagcacgagcagtgacggcagcgggagctttatttttttcatccctgcttcaattgctgcttccgctatttcatccggttttcgaaaagccataataaaacgcctccattacttcttcttttctcacagttatgcaagaaaggcaataaaaaaggcagcactcaaataacctgtgtcaaaccaggcgtttgaatgctgcctaacttgtatgcatacccatacaacaatatcaagcagtatgaagatattgaaagagaatatatacagttcgtgcatacattccattgctttagccttctataactgtagcaacatcatatcaaatgtgacaaatttgtgtcaatgacaaatatactagctttgcagaacttctttttgctcatctatttttcggtcaaaaacaaatacagatacagcgatgttttcctcaattttaatatcagaaaacaaatggactagcttagctcccatgagttcctccattccttccggtgtttgtttggaataaaggtcttgaattaggcttgtccgggccgcatgtaccatctctcttccttcaggcgtgcgggcgataaactgctcgcttgcactcagatttccatatagtgttgaaactgccatgttttctacaaatacagtatgaattctctcaggcccttttccgaacaattctttgcgaagttttcgaataatatcattgaattcatgaatttttttagacatgctgattaccccttccgatattgccttataaaggcttttcccggttcccctcaggacatttcacttggttaaaattttcctgccatattgtattataataaatatcacattataataaaagcagtgttgatggatttgtaataggatcttgttatgagtctatcgttttataaaaatcaaggattggtctgttagtaagacttgctagtgaactattccgccatgtgtgtttacaccttcttagaattaagggcaggtgtatctctatacatggctttttttgacttcttgaaagaaagatggaggggaatatgaatatgatggacgttaagtcgatcagtgtccgtgtagacggaacagaaattcaagcacgagcaggggccacaattttagatattttaaatgaaaacggaattgagtacccgcagatttgccacgtaccagaggttgacccgattcaaacttgtgatacttgcatagtagaggcaaacggcaagctggttcgttcatgcgcgaccgttgcagaaaacgggatgtctattgatctttcaggaaatcgagtgaaagaagcgcaaaccgaagcgatggaccgccttcttgaaaatcatttgctgtattgtacagtttgcgataacaacaatggaaactgtacgctgcataatacagcggaaatgatggggatcgagcatcaaaaatacccatacacgccaaaagaagatccttcttgcgcggttgatatgtctcatcctttttaccgctatgatccaaaccaatgtattgcctgcggccagtgtgttgaggtctgtcaaaaccttcaggtaaatgaaacactctcaatcgactgggagcgcgaacgccctcgcgtcatttgggatgagggagttccgatcaatgaatcttcctgtgtcagctgcggtcagtgtgtcacagtatgtccatgtaatgcactgatggaaaaatcaatgctcgggcaggctggttttatgacaggcattaaagaggacgtcatggaaccgatgattgatctcgtgaaaaatgttgaaccggggtatggcagcatttttgccatttctgaagtcgaagcggcaatgcgtgaaacgagaacgaaaaaaacgaaaactgtatgtacgttctgcggtgtcggatgttcatttgaagtatggacaaaaggacgggatattttaaagatccagcctgtttctgatgctccggttaacgcgatttccacatgtgtcaaagggaaattcggctgggattttgtcaattctgaggagcggatcacaaagcctttaatccgtaaaaacggagcctttgtggagtcttcttgggcagaagccctcgatcttgtcgcaagcagattaggatcaattaaagagcagtacggtaaaggctctgtcgggtttatttcttcttctaaaattacgaatgaagaaaactacgtcattcaaaaactagcgcgtcaggtatttgaaacaaacaacgtcgataactgctcacgctactgccagtctcctgctacagacggattgttccgcactgtcggcatgggcggtgacgccggcacgattaaagatattgccaaagcaggcctcgtcatcattgtcggtgccaatccggcggaaggacacccagtgctcgcaacacgcgtcaaacgggcacacaagctccacggtcaaaaactgattgttgctgacctgcgtaaaaatgagatggctgagcgatctgatctgttcatcagccctaaacaaggcacagaccaagtttggctgatggctgttacgaaatatatgatcgaccaaggctggcacgatcaggcgtttattgatgagaacgtcaattactttgaagattataaagaaacccttaaaacgtatacgcttgattatgcagaacgcatcacaggcctttcaaaagaaaacatcattcaaattgctgaaatgattcgtgatgctgacggcacttgtgtcctttggggaatgggtgtcacacaaaatacaggcggttctgatacatcagcagccatttcaaacctgcttctcgctacgggcaactatcgccgtccaggtgccggcgcttatcctctgcgcggacacaataacgtgcaaggcgcatgtgatatgggaacattgcctggctggctgccgggatatcagcatattacagatgacaaggcccgcgctaaatttgaagaggcatatggtgtcgagattgatggaaagcctggtttagataatattcaaatgcttcatgccattgaagaaggaaaaatgaaagctatgtatcttgtcggtgaggatatggcactggtcgattcaaacgcgaaccatgtgcatgatattttatcaagccttgatttcttcgtggtacaggacatctttctgtcaagaacagctcaatatgctgatgtcgtcttgccggccactccttcacttgaaaaagacggaacatttaccaacacagaacgccgtgtgcagcgattgtatcaggcgcttccgacgcttggtgacgcaaaaccggactggtggattattcaagaggtggcaaaccgtttaggagcgaattggaattacagccatccaagtgacattttctctgaaatggcgagtctttctcctctgtttgccaaagcaagctatgaggtgcttgaaggctggaacagcttcctatggggcagcttcacaggtgaaagcacaccgcttctgtatgaagacggatttaatttccctgacaaaaaagcccgctttgccctttctgattggaccgagccagcggcatttccggaggaatatgaccttcatatcaataacggccggatgctggagcatttccacgaaggaaacatgacaaataaatcgaaaggcatccaagcgaaagtgccgaatgtattcgttgagatctcacctgagcttgcacaagagcgaggtgtttgtgacggttcgcttgtacggctcgtttctccgttcggagcagtcaaattgaacgcgctgatcacagaccgggtacggaaaaatgaactctatctgccaatgaactcgacagacaaggagtcagcgattaacttcttgacgggccctgcagctgataaacggacgaacacgcctgcttataaacagacaaaggtccgcatggaagtgcttggcggctgtgaaacagcgccgcttccaaaaacaaatccgcgcaacaaaaaacggcatccgcaaaacggagtcgaagcagaaagaaaatggaaccgccctggctatgtacatctgactgattaaacgataggaggaaaacgaatggccactccgattacgacgatcaaaaaagaaacaaaaacagctgagcaaatgaagcttgaaaaaatagaagaactgaaagagctgctggcggaaaatgaggacgccgtctctaaaacgatgacgttaatgaatgaactcaatgatcttggaatttttgatgcggcaacaagcatgctcagagcgaaggaagacattgccaagattgcgcttggccaagtttcccgcgagcctgtcaccaacctcatcaacacgatgatggccgccggaggcgcattgacaaaagccgatcctgagtttacagcaaagcttttagaaagcgtaatggctgggactgaacaggcacaaagctttttaaaagaagacaagaaagtcgggattctcgacctgttaaaagcaatgaacgatcctgatatcaacagagccgtcggcttcggccttcagtttttaaaaggcatgggaaaagaacttcgagaacaataacagaaaaacagccatcgctgatgatggctgtttttttattcgtcggcttcttccaaacgcttcttgtaaataagtgaacggtcagcgcaaaagaaggcaccggctaaaaatacgcaatccgctaaaaacatcgtcgatttctggcctaatgttaaaccttgatcagggagaactgcgcctatatataaaaaagtgctgactgcaagcaatgtaaaagcaaaatgcttgtagtcttcttttaaagatttcattctatttttgttcaaaagaatcacctgccagattcatagtatacgactattataatataatccggcggcttacagagaaagtaattctatccatttgttatatattttcaagcgcttggccgatatcttccaacaagtcttccgcatcttcaattcctacagaaattctgatcaagccgtccgtaatgccgagctcaagccggcgttctctcggaatagaggcatgtgtcattcttgcaggaacagaaattaagctttcaaccgcccccaggctttcagcaatggtaaacagtttcagatttcctaaaaacgcatcaacccgttcttcactgccaatatcaaaggagatcatgccgccgaagcccgctccttgcgtttttgcaagctcatgtccgggatgatttgaagaaccagggtaatataacgtttggacagcagggtgattctcaagaaagcttgcgattttccgcgcattttgatcgatcgcttccattctgagtcccaacgttttgattcctctcattaacagccaggaatcttgagggccgagcacgccgcctgtggagttttgcacaaaatgcagctcttctccaagctctttcgaagctgtcacaactaaacctccgacgacatcactgtgtccgccaagatattttgtcgcactgtgcagtacgatatcagcgcctaaagtaagcggctgttgaaaataaggagtattaaaggtattgtctacgataagcagaacacccgctttttttgcgatatcagccatgagcgtcaggtcggtgattttgagcaacgggtttgtcggtgtttcaatataaattgcttttgtattagggcgaatcgctttttcaacttcttccctgctgctcgtatcaacaaatgttgattcaatgccaagacggttaagcacctttgtcatcacgcgatatgttccgccgtacacatcatcagtcaacacgacatgatctccgctgttaaacagcatcataaccgctgtaatggcagccattcctgagctgaacgcatagcctgcttccccgctttccagttctgtcacaagtgcttcgagagcggttcgagtcggattggccgttcttgaatactcgtagcctgtatgctgccctgctttcggctgcttgtacgtgcttacttgataaatcggcacggaaactgcgcctgttttctcatcacctgtgattccgccatgtatcatcaatgtttttttcttcatatcagatgcctccttcgtatatttgtttgctgatatatcgatcgctgctgtcaggaaatactgtgacaatgttagttccagcggatgcttttttcgcttcctccaatgccgcataaagcgctgcacctgaagagcttccgatcagcaggccttctttttctgccgcttctttcacaagtctaaacgcattctcatctgttacggtgtagatctcgtcaaaatggctcttatccatataatcggggataaactccatgccgatgccctctgttttatgagcgtggggctctcctccgtttaaaatcgagcccaccggttcaacaatcaccgttttgactgctggatttttttcttttaagaaggaagctgtccctgcgaatgtgcctcctgatcctgcccctgcgacaaatgtatgaatattcccatcaagcgcttcccacatttcaggcccaagcgtcttatagtaagtcgatggatttactcggtttttaaattgcaaaacgcaataagaattttcaatttcagtctccagctgaatggctttttgaatggcgccctgcattccgtcttgacgcggtgtatgaatgattgatgcgccaagcgcttgcataatttgctgtttctctctgctgaaatgttcagggacacagaaaatcgctttcagcccatattttctggcactcagcgcaaggccgatccctgtattgcctgccgtagcttctataatcactccgccgggtttcactttgcctgaatcgagcgcgtcacgaatcagcatatctcccagtctgtctttgatgcttccccctggattcatcatttcaagcttggcatacaccgccactccttctggaacatcaaagttcttcaagcggagaagcggtgtattcccaatcagctcggtaatgtccgtaatcactgtcatatatgtcctcctccttattagagggtgtttttagaaaaaacggaggagaacattctccccgttttaatgaattcgtttgatcacctttaacacaagctctgttgaatggacagccgcctgctctaaaaattggtcaaatgaaacatgtgattcttttcctgcaatatcagataacgctctgatgacgacaaacggcgttttaaattgatggcacacttgagccactgccgcagcctccatttcaaccgcatacaaatcagaaaatctcgtacgcacctcttcaacccgcttcggatcgttcatgaaagaatcgcctgttgcaatcgttccttttgcaacctgaatgccgtcgagttcagataccgcttcttcagtgatgctgatcagcttttcatccgccgcataagcagccggaagacccggcacttggccgtattcatagtcaaaagccgttacgtctacatcatggtggcgaacgtcagtggaaatgacgacatctcctacattcaatgtatgatgaaatccgccggctgagcctgtgttaataacataatcaggcttgtaacggtcaagcagaagcgtcgtgctgatagcagcatttacttttccaattcctgattttaaaagaaccacttcagttccttcatattcgcctgttgtaaattcacagtgtgcgatcgtttctgtttttgcattttcaagtttgtttcttaagatggtaacttcctcttccattgctccgatgactgctagtctcatctattcacattcccttcactttaccgtttgatcgcctccattatccacacgaagtcgttttgctgagtgaatcggactgcaaaaccttcagctgtaaacatttctttcaacgcatccaatgtaggataatgctctgtctctaaatcatttgcaagctgataaaagccttgagaacgggctttatcgatagcctgttgatacgcttgcgcatcttcaaagacggtatcggcaaacactattttatcatgcaagtgaaggtatttgccatattgctttatggcagcccgcttttcttcgtcagtcaaatgatgaaaagcatatgaactgacaattgtatcagcctgaaatggcggctcagggaatgtcaggaagtctccatcaacgatttccgacctgcctgaaagcttgtcagaagccagtttacgcattgctggagaaggttcgattccaaatacagttttgcctgcatcgagcagcttagccgtcaaattccctgtccccgggccaaattctaacacatgcgttccagatttgctgacgatggcatcaaggatatgatcatagcctctgaacgcttctttatactgaatatctaaaccttgtactgtttgatcataagttgctgcccaatcttcaaagagagggataaattcacgtcccatatttgtcacactccatatttaataattcctataagcatactatgaattaatgatggaacagttcctataataccacatcttctgaaaagcaggtactaaaacactttgtgtattttatgccatctcatattgcgcattgaccgcaaaaaagcttatacttcaaatgacttgtgaaagctggagggtcaagatatgaattttcaattagatctgattaaagacaaagtggaattttttgaagcggcttcattgcaggagcttgaaaagaaaatcaatacacaaattgaaaacaataaagccatcatgctccgggtgaaatctgtttcacaccaaactgctgtggcagaaggaagaatattgtacagcgcggtggttcatttcgcagctgaagcctaaaacaaaagcagccggttctaacccggctgcttttgtttattttagcttttctacttttgtcggcttccagccttttttatcaacccatgtaatcgtgacttgatatttattcccagtcgccttgtccaaaatcttgcctttagcatcctgagggctgccgttatttccaagccagagcaccgtcatgttatctgttgagacaccagttgcgtatgaaatggctttcagcatctcagcccagtcttgtgagcttgaatcataagtagcggcatgctcgccagcctgctcagttccgactgctttccagtcaggattttcatacgttttttccacatcgctcgatgagccgccttctgttacttttgcatctttaagcccgtcaccggctgaatctgagcttgaatctgaatcagagtcatcttttttagaagaagaatcatcttttttggaatcagagtcagaagacttctcagaatccttttcgctgtcagatgtatctttcttgctgtcttttatatcctcatccgatttcttttcagtctttcctgaagccggagattcctgtttttgcgccgtttcagaatccttgctgacatctttgctagaaggactgttaatgaagagattcgctgctactacgacaattagtatggatacgattgcgattaaaatgttaagcactaaattggcttttctgcgtttatcacgattttcataacgagattgattattgctcaataattctgcactcctttatccctcttggctcagcatatattttaacatgtgctgagaagttgttctatttctgattgatttcaatttcgtgtacttttttaacaatatcataaaacaccgaatttgtcagagccttatctcccggtgtatccatgtgtaaaacaaccagagcgtatttcggcttatccgcgggaaaatatccggcaaaccatttttcatagagcgtttccctctcttttgaaagcttgcctgtttgggctgtgcccgacttccctgctacagtatacggaagatcttgaaaccttctgcccgttccggaaggagattctaccacccgccgcagtattttttgaagctgctgtgacgtatatttgtctatcgtttcccctttgagcttctgatctttaaacgtaacgagcgttgtgccgttcttatactcaatttgttcggcaattttcacctgccgtttttctccgccgcgggcgattgtcgccatcatattggctacctccagcggcgttacctttacgtttttctgcccgattgctgtttgcgcaatggcttttttgactgatttgtctttttcatccccccaaatcacgccgcttttttcgttatacagctggcggaaatcggtttcgtggtacagttttccctcccagcctgcccgatcagtgagagccagcttctcggacatatcttcaataaccgagctgtcttttttcattaattgttctgcaagactcgtaaatgtgtaattacagctttgggcaaaactttcatcaaaagacaaggttcctttgtcgtcccccggttccccgtacaggtttaaattgcaattaaaggtttgactaggcttcaccatattattttcgattgcagctgcggcaatgactgttttaaaaactgatccgggatagattggcgtcagcatataattttgaagtgtgttttgccgggacacatctgcatctggtttgcttacaatccccagaacactgctattttcgatgtccagcagcacagctcctccctttttcagcccctgttcatccaatacctcctccatcgctttttgaatgctttgatcgatcgttgttttgacctggagcggataaaatgtattggcttcagctgtatatttgacgtccatgccaaacaaagggtttccttttccgtccacatgatataaaagctttgtgtcttgttccggaagcaaaaactcgtcaaatgtccgttctaaaccggttgttccgatttctgttgtaatcggaaggctctccttgtcaggatatttcttgcgaagcagcgccggatcttggttcgtgctccctatcgtatgtgaagcaaggctgggcttgtcttcattctccatatatacgccgtaaatgccgggatatttcaaagaattgatttttgtgatagattgttttgaaagtgttttgattttcttttgctgcaaaatgaccggtttttttgcctgacctagtgtctggcgcaaatcatcttcagacatgccgaggatgtccgcaacttttttgatcggccaatcctgcgtcagcagaaaagggaacaaaacaaccgcaggctcgctttgtcctgtcagcgcccgcccgtttcgatctaaaaaagagcctcttccatctgaaatgagcacttcctccgtccgctgtttcacactttcttgaatcaaattaattttctttttagaaaatgattctgtgaaaaacagctggatttctgcaagtctcagcagaagcagaaaaaatacaatcaaaaaagcgatgactgccagcttcattcgtttcgatatcttcataaaaaaaacacctcacccacattgtggacgaggtgtttcgctgctaaacagatattatgaaattttcacaattttcacgagcatttctccgcccggtgtttgtactgtgacttcttcatctacttttttgcccaagaggctttttgcgatcggtgaatcgtttgagattttcccttcaaacgggtcagcttccgcgcttccgacgatcgtatatgattcttcatcaccgtcaggcagttcgacgaaagtgacggttttacccaaaccgacaacgttagagccgccgtcatcttcaatgattttcgcattgcgaatcatattttcaagagtcgtcacgcggccctctacaaatgcctgctcttctttcgctgaatcgtattcagagttctcggaaaggtctccgaagcttctcgcaattttgattcgctctactacttcttttcgtttaaccgttttcaaatattctaattcttgttcaagtttttgttttccttctgcagtcataggaaaaactttctcttgtgccatgtcccttcactccttctggttgtccctcaacatcttcgattatgtatgagagcataaactaaaaaatacaagaatgagaacacagggcagtcctcgttcttctctcccatataggtactgtttatcttaaactgaatcgtgtcgttctgcaaatatttcgcgtttataaacagggaaagaagggaattcgcacattcccttcctgcctatacataatatggtcagagttatttatgtctatgctatggtattacaaaatcgcgttttgttcaagaatggtttgaatttttgtgaccatcagatcaattgcgacgtgattctgaccgccttccgggataataatatcagcgtatcgtttcgtcggctcgacgaattggttatgcatcggacggaccactgacacatattgttcaatgacagaatcaatagagcgtccgcgctcattaatatctctcataatccgtctgatgatacgcaagtcagcgtccgtatcaacataaagcttgatatccatcagatcacgaagccttttgtcttcaagaacaagaatgccttcaaggataataacatcctttggctctacgtgaaccgtttcttctgaacgtgtgtgaagcttatagtcataaatcggcttttcaatcgggcggtaattcaatagatcttgaatatgctcgattaaatagtcattatcaaacgcaagcggatgatcatagtttgtgttcagcctttcttcaaacggaagatggctttggtctttataataaaggtcctgctggatcattaaaattgagtgtcctttaaactgttcataaatggaccgtgtgacactcgtttttcctgaaccggaacctcctgcgattccaatgactactggattcttacccatgggctgttacttcccctttctcatcatgttgctcggataaatctttttgtctagtttgaatttgacaatttgcaggggatggcgggcagcatctagctcatttccgtcttcgtcccaaatggtttcaatcgtatgtgtaaagttttcgatttctggaccgaaaaattccacttcgtcgccttttttgaagaaattgcgctgctgaagcgtgaccatttgtgtatcttcatcataattcagcactaagccgacaaaatcatatgtcgttttcttggcgtgttcgccgaacatttgctcttcatagcctggcgttccttcaaagaaagctgtcgcagtgtccctgttggcgcacttatcaagctcttcaagccattctttttgaatcacaaagttttctggatcagcgcaataagcatcgattactttgcggtatacgctgacaacagttgctacatagtgaatggatttcatgcggccttcaatctttaagctgtcgatccccatttcaatcatttttggaatggattcaatcagcttcaaatctttcgggctcatcgcaaatggtgcatcttcttcaccatacaaagcaacggcgttggcaccgtctgtttggtagagatcataatcccagcggcatgactggcagcagcctccgcggttggaatcccgcgctgtcatgtgattgctcagcacgcagcggccggaatatgcaatacacattgcgccatgaatgaaggattcgatttcgatatctaccttttctttcatttctctgatttcaagagcgctagtttcacgtgccagcacgacgcggtcgagaccttcttccttccagaactggacagccttccagtttgaaagagactgctgtgtgctcaagtgaacctcaacattcggcgccactctgcggcatgtttcaataataagcggatctgccacaataataccggcaacgttggcgtctccaagcgcttttaaatagtcttcaagcccgtccatgttttcattatgagcgaaaatattcgttgttacgtagatcttcgcgccatatttctttgcgaattcaacgccttctgcaatttcttcgatcgtaaagttatcggcattcgagcgaagcccgtattcctgtcccccgataaagaccgcgtccgctccgtaatgaacagcgattttcagcttttcaagattacccgcaggtgcgagaagctccggctttttcgtaatcacacgctttccattaacgattgtggatattttatcatttacggcagtcatagcttaacctccttttgattaataaaccgtttccttgaagaagaatccggtatcaatttttctgtttactggctggatgctttcaatgcgttcgatccagtcttcttttttcgcttcgtattcgtcacggttttccacgcacaaatcaattgcttctctgtacattttggtgacttctattaggtattcaggcattttcaaaacaccatcgattttgaaagaatcaattccggcatctatcaattcctcgagctcatcaatgatgcacacatcgttcgggctcatgatgtgagtgccgttttcatcttcgaaaatcggatatttattatcgcgttctttatcgtgtaaaaacatgcctgattcttttttctttctttcaatgtccatgactttgccctgatattcaaaatagtttccaatcaaagaacgcttcgattggaacatgcacgtcattccatgcacctggatttcaatttcgacttcagcattttctttaatctcaacaatgctgtccatgtttaattctctggcaagcacagaacgcgccgcacccttgcgtccccagtagttgcatgtataatagttggtgcctgtcgtttctgtgctccaatgaagcttcagatcaggcgcagattcacgggcagccatcagcacggcaggatcgccgaataccgctgcatcgacaccggcttctgctaagaaagccagatattcgccaagctcacccactttatcattatggaaaattgcatttacagcaacgtatacttttgccccttctttgtgagcaatctctacggcttttgttacatcttcacgagaaaattctccggctaatctcaagccgtatctctgttccccaactaaaaacgcagttgccccagcctgtatgagcggcaaaatgtccgctgtactcgtcggcgtcactaagagctctggttttttcatgacgttcacctcttctttttactaatcgcaagtccgtccccgacaggaataatcgcagtttgataatccggatgattcatcagccaatgattatattcatcaattttggctacaagcctgcgccttctcttcggttctattttgctgtaatcctctgccaccagacctttaaacagcacgttgtctgttataatcaccccgtccggtgaaagcatcggttcatataaatgaaaaaagttttgatactgaccttttgcagcgtcaataaaaatgacatcgtaaggcgcggttacatgaacggcgtcggctaattcaagcgcatctccgtaaaaaacatgaatccggtcatcaagctgaaattccttgatattgtttaccgcttcttcatgccgtttctcattgcgttcaattgtatatatttcagcagacggcagttccagagccattcgaatggctgaataaccaatggccgttccgatttctagtatttttttcggctgtttcacagacaaaatttgaagcagcacctccatgcccgctttttccataatcgggacatgatgttcttctgcatatgcttcaagtctcttcacgttatccggccgaggctttaataatgcttctatatagtcatttatttgttcataccggtcagtcactacaaacagcctcccgttctaaaaaggagtgccccagtcttatgcgcaggacactctctgaatacatcatgatacatcggtaaacaacccgatatattttatcataaaaccttgcggaaagcgaacaaaaggagagctttttgctctccttttatttctcattttttgaggaaatgtatttttcttttgctttattatgctcttttagcgtttttgtaaatacgacctcaccatttgatttggccaagaaatacagatagtccgttttatccggatgcagcgctgcttcccatgatgacatgccggcattggcaatcggccctggcgtcagccctgtgtttttatacgtattgtatggtgaatcgatttccagatccttataaagaacccgatctttatgcttgcctgccgcgtacaggacggtcggatctgtttggagcggcattttctttttcaggcggttataaaagacgctcgcaattttatggcggtcggctttttcagtcgcttcttcttctatcaaagaagccattgtcagcagcttatgcacagaaactttgtttttcttcatttctgatttatatgtttccacataagaatttgtctgcttaatcattgccttgataatgtcttcaagtgatgtgtccggatcgttaaaagggtatgtagccgggaataggtacccttcaagcgggtgcttaatgtttttattgaaaacatcatttgtcacagtgtccgggaattctttcttcagctgattgataaatgtttcatcgtccagcttcgctatgacttgttttttagagtattttgtttcatcagcaatagcagccgcgatttgggtcagctgtgctccctcagtcactgtgatttgaaaagcgtaacctgtagccccgcttgtcagcttctgaataatggcatctaaatccatacctttattcagatggtagaatccggcctgaaacccggaagcacctttatatttcacatagtactgaaacgccttctcgctttttatgacatcatttttctttaatatcgatgcgatggctgaaacagacgaaccgctcggaatgttaatattaactgtcgttttactgtctttttcaacaggttcaagcaatgatttcccatataaaaatgccccgccaatgatgagaaacagcacaacaatggaagacagtatgattctttttttattaaaaaacgattttttttgctgattgatatacattaggtctcctcccatcagctcttatactacatgattcattgtatttcggcaatttattacaaaaagaggcctgcataaagcagaaaaaagccggagcagtatagctccggctttggtttggcgcgatgttttactcttcgtcttcgtccgctaagaatgtgtttagtgtttcttcgatcatatcccattcttcgtcagtttcaatcgggaatagctcaccgttttcaccgtcttcgtttggcgtgaagctggaagcaagaatttctacttcttcgtcatcttttgattcgattggatagtacaagacataagatttgccaaactcttcattttcaaatgtaaacagcacttcacaaagctgttcatttccttgatcgtcaacaattgtaatatttttttcgccgtgttccattttcttcacctctggctttaatttaagctgtcaagatatccttgtaaaatcataacagccgccattttatcaatgactttttttcgtttttgcctgctgacgtcagctgcaatcagcattttttcagccgccattgtggtaagacgctcgtcccacagcacaacaggaacattgtacgttgtttcaagcactttcgcaaatgtttggctggcttcgcctctcgggccgactgttccgttcatgttcttaggaaagccgagcacgattttatctatagtatagtcctttatcagttcagataaacgggataaaccataatcgccttctgcttcatttatctttatggtctcaatgccttgagcagtccagcccatttcatcgctcagagctacaccgagtgttttggttcctaaatcgagtcctaatattctcattctttatttacgcctctttatgctgttctaaataagactttaccaattcctcgattaattcgtctctttcaagtttgcgaattaaattgcgagcgtcacgatgcctaggaatataagcgggatcacctgacagcaagtatccgacaatctggttgattggattgtagcccttttcctgaagcgcgtcatacactgtaatcagcacctcatttacgttagtctcagcagaatcatcggagaaattaaatttcatcgttttatcaaacgagctcaccgttttgcacctctttcccaaattcgcaggcaaagttcagcctggggtcctaatcttaccatcattctacactacatgggcgaattataaaacggatttcacccaatcttctacagaagccaaagcttcttctaatttttccggctgtttaccgcctgcctgcgccatgtccggacggcctccgccgcctccgccgcaaacttccgcagcttgtttaaccagcatgccggcgtgaagtcctttctcaatgaggtcctttgtgactccggcagagatattaactttatcgttttgtaccgcaccaagcacgatcaccgcagagccaagctttgctttgagttcatcgaccatagtgcggagatgattcatgtcttttgcatttacttttgccgcaagcacgtttacgccgtcaacttcttttactttcgacaggattgctcctgcttccacgttgcctagttttgcaagaagagattcattttctctttgtgcatccttcagttcagcctgcagagccgcgacccgtttcggcacttctttgatatttgttttcagctcgtcagcggtctgcttcaatacagaaatctggctgttcatttcgacgtaagcgccttgtcccgttacagcttcaatccgtcttgtgcctgctccgattccggattcagaaacgattttaaacaagccgatttctgctgtatttctgacgtggcagccgccgcacagctctaagctgtaatctccaacttgaacgacacggacaatatcgccatatttttcgccgaacagtgccatcgcacccatttcttttgcttcagcgatcggtttcaaatcaatgctgaccgggatgctcgcccagatcttttcgtttacgattctttcaatttgttcgagctcttcttttgtcacttggccaaagtgcgagaagtcaaaacgaaggcggttttccgttacaagagagcccgcctgattgacatgagttccaagaacatcttttagagcctgatgcaataaatgcgttgccgtgtggtttttaatgacgccgcttctcatatggtcttcaacttcagccgtaacatgcaggcctttttgaacagtaccgctctccacaacaccttcatgcacatgctggccgttcggcgctttttgaacatctttaattcttacaactgcctgctcgcttcggagatagcctttgtcgccgatttggccgccgctttctgcatagaacggtgtttcatcaagaatgatttgaacgctttctccttcatgagcctcttcgattaattggccgtcctgaagaagcacaatgatattggcatcagctttggtttgagagtagccgacaaatgtgctttcaactgtcacgtcgcgcagtgcgccgccctgcacctgcatgctgccgacatcctggcgggcgtttcttgcccgttcacgctgctggttcatttcctcctcaaagccctcatggtcaaccgtcatgttctcgtcttctgcgtattcttcagtcaattcaaccgggaatccatacgtatcatacagtttaaacacatcagcacctgagataacgctgctgcccttgtctttttcttttttgatcatttctgacaggatcgcaagcccttcattaagggtctcatggaagcgttcttcctcggttttaatgacttttgcgatgaaatccgctttctctttcacttcaggatagaaatcagccatgatttctgcgacaaccggcactaaatcaaacatgaacggacgatggatgttgatcgttttggcataacgcacggcacggcgtaataagcgtcttaatacatagccgcggccttcatttgacggcagcgcaccgtcactgacagcaaaggcaaccgttctgatatggtcagcaatcactttaaacgcagtgtctttcacattgtctttgccatatgtttcaccagaaatcgattctgttgctttaatgatcggaacaaacaaatcggtgtcaaagtttgtcggaacattctggatgacagacaccattctttcaagacccatgcctgtatcaatatttttctttggaagcggtgtgtacgtgccgtcagggttatggttgaactctgagaacacaaggttccatacttccaggtaacggtcgttttccccgcctgggtaaagctccggatcttctggatcattaccgtatgcttcaccgcggtcgtaaaagatttccgtattcggtccgctcggcccttcaccgatatcccagaagttcccttccagacggataattctttcttcaggaataccgatttttttcgcccaaaactcatatgcctcttcatcttcaggatgaaccgtaacagagagaagctctttgtcgaagccaatccacttgtcgctcgttaaaaactcccaagcccatgtaatggcttcttctttgaaataatcgccgatggaaaagtttccgagcatttcaaagaaagtgtgatggcgcgcagttttacctacattttctatatcgtttgttctgatcgctttttgagcgtttacgattcttggattttccggcacgacacggccgtcaaaatattttttcagcgtcgcaacaccgctgttgatccaaagcagtgaaggatcctcatgaggcactaatgacgcgcttggctctaccgcatgtcctttttctttaaagaaatccaaaaacatttgacgcacttccgcagaagttaagtgtttcattgtatttcctcctctataaaaatcgaaattctcttcagtgacagcaaaaaagccctccccctatgcaaaccaacgtttacacagggacgagagctgtctcgcggtaccaccctgattacgggcattcatgcgcccgtcacctttaaccctgtaacgcaggataagcggcagtgattaactgcactcaggattagcttcctccgatcttctgataaagctcctttcagcttatggagcttctctctttaacagggcttcggcgtactcagatccgtcactcgagattcgtatgtattctacgagaaattatagacaagcggcacgccgatgtcaatgctccgtcctcatccgcaaaaaatggatcatcattacttttaaaacagccgtcgcaggaacagccagaatcatcccgacgatacccgcaagctcccctccggcaaggagtgcaagcatgataacgaccggatgcattttaaggcttctgccgacaatgaacggactgaggatatttccttccataaactgcagaataaacaccgtaatcaccacaacaagaaccgccttgactgagatcgtcatcgcaattaacaacgcaggaacagctccgatgaaagggccaaaatacgggatgacattcgttaccccagagataaggccaagtatcagcggatacggaagcccaaatacccagaacgaaatgcctgcaatcacgccaagaatcaagcagaccaaaagctggccgcggatataatcgccaagcgaatcatccacatcccgcaaaaaggcgctgccccgctttctccacgacttcggagtcaagtaccatactgtctttttcattaactcaatgtccttcaccatataaaacacgagaaaagggattgttgcagcaattaagaagtaatcaagcacattgcggatcccgctgatcgcaccctcgatcgttcccgcaaaaaacgcctccgtctggcggatcattttatctatacggtgatgcataccatcaggccagtcatccgtatggttatgcacatgaagaagaagcccgttatacgtttcggcaaacatgggtatattttctgacaaatccgtcagctgcacgattaaaacaggcacccctttatacaacgcccagccaatcccgccaaaaaaaagaacataaatgaccaagatgctcaaagtcctaggcaatcctttgccatgcagccattctgtgaccggaagcaataaataagatataaaaatagaaatgatcaagggaataaagatcgtttttatgacgagccaaaagggtgaccataacatatcaagcataaaaaagacatagactgttaacagaaccagcaaacaaatagccacccacaacaaaagctgcaccggtttttggagcatctgctttcacctcacctatatcttttgaggtttacaaggaattattctttatgtttctttagtcagtcagaagtcatggacattttttcacttttaattttcagaaaagtttgatcatttactttttggtcaaattttctgataggaggattgcgatgatcacatttcaaaatgtaaacaagcattacggagattttcacgtgttaaaacaaattaatcttcaaatcgaaaaaggtgaagtcgttgttatcatcggcccatccggttccggtaaaagcacattgctcagatgcatcaacagacttgagtcgatcaatgagggagtgcttacagtaaacggcaccgccattaacgacagaaaaactgatatcaatcaagtgcggcaaaatatcgggatggtgtttcagcactttcatttatatccgcataaaacagtgctgcagaacatcatgctggctccggtaaaagtgcttagacaatcacctgaacaagcaaaggaaacggcgcggtactatcttgaaaaagtcggcatcccagacaaggctgacgcctatccttcccagctttccggcgggcagcagcagcgtgttgccatcgcaagaggactggcgatgaagccggaggtcatgctgtttgacgagccgacatcagcacttgatcctgaaatgatcggtgaggtgctagatgtcatgaaaacactcgccaaagaaggcatgacaatggttgtcgtgacacacgaaatggggtttgccaaagaagttgccgaccggattgtcttcattgacgaaggaaaaattttagaagaagcagtgccggctgaattttacgcgaacccgaaggaagaacgggcccgcttattcttaagccgtattttaaatcattaaaacagaaatggggagcttgtatgaaaaagattttttctttagcattgatttctttattcgctgtcatcttgcttgccgcttgcggcagcaagggatcaaacggagaagcctcaaaggagagcaaaaaagatacgctagccgccattaaagacaatgacaaaattgtcttcggcgtaaaaacggacactcgactgttcggtcttaaaaatccaagctcaggtgagattgagggttttgatattgatattgctaaacaaatcgctaaagacattttaggtgatgagaaaaaagctcaatttaaagaggtcacctcaaaaacaaggattcctatgctgcaaaacggggatatcgacgccattgtcgccacaatgacgatcactgaagaacgaaaaaaggaagttgacttttctgatgtctatttcgaggccgggcaatcgcttctcgtgaaaaaaggcagcaaaatcaagagtgtcgagaatcttggcaaaggctcaaaagttcttgcagtaaaaggctccacctcctctcaaaacattcgtgaaaaggcgcctgaagcatctgttttagaatttgaaaactacgcagaagcctttacagcccttaaatcggggcaaggcgatgccctcaccacagataatgcgattttatatggaatggctgatgaaaataaaaattatcaattaacaggaaagccttttacagatgagccttacgggatcgccgtgaaaaaagggcaatctgctctcgcgaaagaaatcaacgcttcacttaaaaagatgaagtcggatggcagatacgatgaaatttataaaaaatggatcaaagaagacccagctgaataacaaccatcccgggatgagcaggcgatgctcatcccaatttgataaggagtgaataggcagatgaatgtgtcaattcttttcgataacttcagcatgtatatggacggtttttaccataccttgctcgcaagtgttatcgcgctggccggcagttttgtcctcggcgttgctgtagcggttatgagaataacagtctttaagccgctgcaatggctcgggaccgcatatgtagaattcatccgcaacatccctcttcttttaattacctttgttttctatttcggacttccaaacgcaggcctgaggcttgacggttttcaagcgggaacggttgctctcaccatttatacctctgcgtttatcgctgaagccatcagagcaggcatccagtctgtttcaaaagggcagatggaagcggcacgctcgtcaggctttacctacagccaagccatgctccatatcattttgccgcaggcaatcaaaatcgtcattccgcctttaggcaatcaatttttaaacttagtcaaaaactcttcgattcttggggttgtggccggattggatcttatgtaccaagccgatttagtttcgtcgagcacactcgttgtatttgatgtttatatttttgtggcgcttttttacttagtgctgacgattccgcttagcatcggtgttaactatctggaaaaacggctggaaaaaagctattgataaggagtgagttacattggatttcatcggtgcttattcacaggagcatttagcgtttttatgggatggctttctcgtcaccttgtacgttgctttcatctccatcattctgagctttttcttcggtttaatcgcaggcaccctgcgttatgcgaaagttcccgttctttctcaattgattgcagttctcgttgaaacgatcagaaacctccccttgctgttaattattttctttacgttttttgcccttccggaaattgggattaagcttgaaattacagctgctgcaattacagcactaacgatttttgaatccgctatgctatctgaaattatccgaagcggactgaaatcaattgacaaaggacaaattgaagcggcgcgctcctccgggctgagctatacacagaccctgttctttatcgttatgccgcaagcgcttcgccgcatggttccgcccatcgtaagccagtttatttctttattaaaagatacatcgctcgctgttgtgatcgccctgcctgaactgattcacaacgcgcaaattattaacggccaaagcgctgacggcagttattttttcccgatctttttacttgcggcccttatgtatttcgcagtcaactacagcctttcactcgcagcaagacgcctcgaggtccggcaaacatagaaaaggatactctttggagagtatcctttttgcattaaaacattttcgtaattcttcttctcatccgcttcatgcttcgattattcagcatgtcagattgagtcgccattcggtacacgagagctccggctcccattgccaaaagagaagtcatcgtccgattcatcctgcgcatctcctttcatgattaaaaattgatgctgcgttcatcctcagaaaacaaatcatccaagctgcttaacgttccgtcttcttccacctgatgagttgcaatcttccctttcgccactgtcagttcaataaaacagccccagcaataatattggttcacgccgattttgccgatatccttacttttgcaattcgggcatataagcatacctcacacctctatccgttcagaacgatctcgtctttccgcacctcgacaagcgaatccgctctttggatctggcgcttgcttcccgcaaggtcagaaaagaaaccgtccgagagttcatatgctacgattatgcccctgtccaaacaaaagtatacatcttccagcatccccaatatatcgccctcttgcgatttcacaagcttcatcttcatctgctcgtatgtgaagcatgatttcggaagaggcaaaagctgttctgaactgaccgaagccaatatgcggtcatcaagaatggaagagatatcacacgcccgtaatagcgcatgatgatgatgcaaaaagcgtttttgtgcaagaataaacccaagacaatctcctttcagagaaaaacaaatatcggaaattgccccgagataacaagaagttcgttctgagtatactgggaatccttctacttcatggcatgttctcaaagtgtgatcaaccaccttttgttgaacaggcttaggttttgctttgcgccttagactcatacgatgaaatcaattccactgcaaatgaaaaaaactcccgcttgcacgggagcattttattgctgttcttctttcataaaatcgaatggtgtaatgccttccatgccaatgttggcgtcgtgtacgctgaacgggagctctttttggagagcctcaagctcggcatccatttcctcaacctgtacggacagcctgttttttaaggaggtctgtctgacagttgcatcattatttttcacgccccactccagcgcctcctcttccccgcataaaatgagaaatttcttcgctcttgtaatcgcggtataaagaaggtttcttctgagcattctataatagcctttcacaacaggcaaaaccacaatcggaaattcacttccctgcgatttatgaatagaacagcaatacgcatgggtaaattgattaaaatcttttttcgtaaatgtcatttcattgccgtcaaaagaaacgacggccatgtcttctttttctgtattttcctttgcataaaatatcgacgtgatttcgccaatatctccgttgaacacattgttttccggctgattgacaagctgcaaaattttatctccggttctgtagacaacatccccgaacttcaattctctccgtttttctttaggaggatttaaaatgtcctgcagcatcacattcaattcattaatgccggcttttcctctgtacatcggagcgaggacctgaatgtcctttgctgtatagccttttttcaatgcattggcgacaaccttctcaactacttctttgatttgcgacccgccgcagcgaataaaggaacggtcctttgtcggggcagtcaaattgttcggcagcaatccatttttcatctggtgggcaagctcgacgattgatgacccttctgcctggcgatagatgtctgtcagtctcacagtcggaatcacctgggatgccagcaggtctctgagcacttgtcccggaccgacggaaggcagctggtcttcgtctccgacaatgatgatttgtatatgatcagggatcgccttgaacaaatgattcgccagccatatatcaagcatactggcttcatcgataattaacagcttcccttcgatcggctgatcctctgtatgagtaaagccttcagcaccgttccagccaagcagcctgtgtatcgtaactgcaggaagtcccgttgattcactcatccgttttgctgctctccctgtcggagcggccaaaacaatcggaaaagcttcatcctttttataagctgacggatctagtgacacaccgtgaagctctccgtagagctcgacaatccctctgattaccgtcgttttccctgttcccggaccgcctgttaaaagaagcatcggcgaggaaagggctttttgaatcgcttccttctggctgggggcatactgaacgttcatccgttcttccagttctcccaacgcgagcaaaaactctgattcgggaaactggttctcatattcggtttggctagcgatatgtttcacacgctttgcaacgttttgttctgcgtaaaacagcgaaggaaaataacagcggccatcttctatgacaatgtctttattttctccaagggcaataatcgcgttagcggcatccatttctgtgatgcgctgcccttcccttgctgactggtttaacagagattgggtgtcaatgatcagctgttccgtttctatgtacgtgtgcccctctgacagacaagtcgtttcaagcgtgtacaaaatagcagcttttacccgctcaggatggttacccgaaagacccattctgctgcccagctcatccgctttcccaaacccgatgccttctacatccttcacaagctgataaggattttcctgaatcttttcaagcgtctcagattcataggcttgatagattttcatagacagctgcgggccaaaaccaaactgattcaaggaaatcatgatttgctccagtccctgatgccgctgcaatgcgccagccagcgtgtcggctttcttttttgagagtctgggaacatcataaagcactgaagcgtcagccaatattttattaatggcgctgtcgcccagctttttcacaatttcttcagctgtttttttgccgatcccctcgaataaatcactcgataaatattgaatgatgccttccttagtcgttggaatctcctttttgaaatgctccgcctgaaattggagcccgaattttggatgagttacgatctttccgtaaaacgtgtaggtctcttcttcttgaagcgcagggaagtagcccgtcacggatacggctttatcttcaatggcttcggaggtctctgtgactttcactttcagaaccgtatataaattggtgtcattatgatagatgactgtgttgactgtcccttttaaatagggctcttcctccagtttaagctgatccggatgctgctgcacgagctgtccctcctcctgtgcctgttatgatggatcaatcagttttttagcatgaagcgcaagcatatgatctggctggatatcgattgccttgtccagcatttccagcgctttttctcggttttctttataagcataagcgacaccggcattataaaatgcatctgcatgccccgggtcttgctctgtcacagctgagaattggctgagcgcttcgtccagcatgccctcgttggctaagcacatcccgaattgaaagcgcgcttccgtatcgttttcattcagttcgactgctctttgtaaatatggcagtgcaagcttaggctgttcgagcttgacaagcaccgttccgagcatgtaaaacaggtcgccgttttccatccccgcacgaagcgctttttcaaacatgtctttggcttctttgtacatttcttttacaacatagacatttcctgctccataataagcagtggctgcgctactgtctaattcaagcgctttatcataaaacgcaagcgcacgttccagctcgtttacggatgaaagaaggttggcaaaattgatatacggaatcgcgtcttctttattttcttcaatcgcttttgtaaatgcctctgccgctttctcgtaatcgccttcctgcatcgcctctataccgagttgattataatccaccgatcatcttcctttcattaaaaaaccccaactcagtgttgaggtttttcatcttttatacgtaccacaattttgttccgtctttgtacacatcatcaattgtcccgccgccaaggcattcttcgccgtcatagaagacaacggcttgtcccggcgttacagcgcggacttgttcatcaaagatgacttccgcttcaccctcgccagtcatgcgcaccgttactttatgatcttcttggcggtaacggaatttagccgtgcaggaaatctcttcgcccttcatgatatccgaacgtacccagctgatatttgttgctgtgattttgtcagaatataaaagcgggttatggaacccttgatccacgtagaggatgttcttttcaagatctttgcctaccgcaaaccacggctcgccgcttccgccgatgccaaggccgtgacgctgtccgatcgtatagtacatcaacccgtcgtggcggccttttacttcgccgtccatcgtcatcatatcgcccggctgtgcagggagatattggctgagaaacgttttgaagttgcgttcgccgataaagcagatgcctgtactgtcttttttcgtcgccgttgcaagttctgcttctttggcgatttcacgcacacggcttttttgaagttcgccgatcgggaacatgactttgctcagcgtatcttctgtcagctgattcaggaagtacgtttgatccttgttttcatcaatgccgcgcagcattctgacttttccgccgcttctgtctactcttgcatagtggccagtcgctaaatagtcggcgccaagtgacaatgcatgctccaaaaaggctttgaatttaatttctttgttgcacaatacatccgggtttggtgttctgcctgctttatattcatcaaggaagtattgaaataccttctcataatattgcttttcaaagtttacggcataatacggaattccgatttggttgcagacgcggatcacatcttcataatcctctgtcgccgtgcaaaaaccgttttcgtccgtatcatcccagtttttcataaagattccgattacatcatagccctgttcttttaacagcagggccgccacagatgagtctactccgccggacatgccgacaacgactcttgtatcctccggccgtttttccatttcattcactccaattactacgccgccttattgtgtcagccgtttgacaacgtcggccacatgtttggcagcagttttcacttgctcagccgtattgccgaggccgaagctgattcgaatagaggacgtcagccggtcactctcttcgccgaacatagcagtcagaacatgtgacggcaggactgaaccggccgtgcacgctgaaccgctggagacagcgacaccagccatatcaagattaaccagcagcgcttccactgacacaccggggaaataaagattcagaacatgcggcagactatgctctttgtccccgttgacctcgaatgccacacctgcatctctaagcgtgtcggcaaagattgctttaaacgattgatacttctcgtttttttcgtcacgttcttcacttgacagcttgatcgcttctttcagcccgacaatgcctggaacattttccgttccggcacggcgttttctttcttgctctcctccgaataaaagcggtgaaagcttcacatctttactagcatataaaaagcctgtcccttttggcccgttgagcttgtgcccggaaacagacagaaggtcaatatggctgtttttcacatcaattggcagcaacccgaatgcctgaacagcatcggtatgaaaataagctttgtgttcctttaacagctcaccgatttcttcgatcggctgcactgttccaacttcattatttccatacatcactgtcacaaggattgtatcatcacgcagtgcttctttcacctgttttgcactgactcttccattttggtcaacgtccagatacgttatgtcaaatccgtcttcctcaagtttttcacatgtgtgaagcacggcgtgatgctcaatttttgttgtgatgatatgtctgccaagatcttttcttgcaagtgcggttcccatgatcgccaagttatcagcttccgttcccccgcttgtaaaaatgatctcctgctctgccgctccgatttctgctgcgatctgcgctcttgcttcatccacccattttcgagattctctgccaaatgaatgaatactggagggattaccgaaactgccggagaagtgcggtatcattttttccagcacgcgctcatccatcggagacgttgcggcatgatctaaataaatccgttccattatgtttacacctctgatctaaatatagaacatataagcttcttgctctccgtctgtatagctggcaagatcctctaatgttgtactgtctaaaacctcttttacagcatcccggatgcgaatccagagctcacgcttggcaggctcctcatcttccagcacttcaacagggctgatcggcccctcaagcacacggataatatctcccgcagtaatggcatccggctcactgcctaatacatatccgccatatgcgcctctgatgcttttcactaaaccggcatttctgagcggcgataccagctgctccaaataatgctcggacaaattattcgtctgtgcgatgctttttaatgaagtcgggccttcaccgtgcttttttgcaagctcgatcataatggtgagcccgtatcttcccttagttgatattttcaacatgaacacctctgttatttcatgattttccacatttataatggtaatttctatatgtttcgtccgtttattatcttatagaccaactgttattataacataccttcagcgaattttcattgaggcagaaggaaaggggcctttacccttttctaatgtacggttttccgttaccctgtaattaagtaaggagagatgatagatgaagccattggcatatcggatgcgtccgacaaaaatagaggatattatcggccagcagcatctggtggctgaagataaaattattggcagaatggtccaggcaaaacatttgtcatccatgattttgtacgggccgcccggaattggaaaaacatcaatcgcaacagcaatcgccggttcaacaagtattgcttttcgaaagctgaatgctgtcattaacaataaaaaagatatggaaatcgtagctcaggaagccaagatgtccggccaagtgattttgattctggatgaagtccacaggctggataaaggaaaacaggattttctattaccctatttagaaaacggaatgatcattttgatcggagcaacgacggctaacccgtatcatgccattaatccggcgatcagaagccggacccagatttttgagcttgaaccgttaacacctgatctgattaaacaggcactggaacgtgcgctccatgatgagcatcggggccttggcacctattctgtatccattgatgatcaggcgatggagcattttgcccacggatgcggaggagatgtccgctccgctttaaatgcgcttgagcttgccgtgttgtcaacgaaggagtcagcagacggtgaaattcacattacattagaaaccgcggaagaatgcttgcagaaaaaaagcttttctcacgataaagatggtgacgcgcattatgatgtactgtccgcttttcaaaaatcgatccgcggctctgatgccaacgctgctcttcactatttggctagattaattgaagccggtgatctggagagcatcgcaagacgattgcttgttatcgcctatgaagatatcggtttagcaagcccgcaagccggtcctagagtgctgaacgctattcagaccgctgagcgagtcgggtttcctgaagcgcgaatcccactggccaacgcagttattgagctttgcctctcaccgaaatcaaactctgccattctggcaatcgatgaggccctggcagatatcagagccggaaaaattggggatgtcccgaagcatttaaaagacgcgcattataaaggagctcaggaattaggaagaggaatcgactataaatacccgcacaattacgacaacggttgggtcgaacaacaatacctccctgatcctctgaaaaataagcaatactataagccgaaacagacaggaaaattcgaatccgccttaaagcaggtgtacgataaattaatgaaaagaaaataaaacaaaaacagccttgatcatcaaggctgtttttatgcattatttatccttcacacgtttgatttcaatgtctttcaaaagatccatgacaacatgtccgcccataatcaaacctgcaactgacggcacaaaagcattagaggaaggcggcatttttgctttacggattttcgcttcgtcattccccacttcttttctgacatcttcccgaatgacaatcgggctttcatcagagaaaatcacttgaacgccttttttgataccctccttgcgtaatttcgtacggacgaccttcgcaattggatcagtgtgcgtttttgagatatcagcgatttggaagcgtgtcggatccgttttatttgcagcacccatgctggagatgagcggaatatcccgtttcagacattccttcattaaatgaattttataacaaatggtgtctgacgcatcaatgacatagtcaagatcatagtcaaaaaactgctcatacgtttcctccgtatagaacatttttaacgagattacttcacactccgggttaatgtctgcgatccgcgccttcattaaatcaactttcggctgtccgacagttgaaagcagcgcgtgaagctgacggtttacatttgtaatgtcgacatcatctttgtcgacaagcagaatgcggccgacgcctgaccgcgcgagagcttccgccgcgaacgacccgactcctccgactccaagcacagcaactgtgctgtttttcagcgtttcaaggccttcttttccgatagctaattcattgcgtgaaaactggtgtaacaagaacctcactccacattcgtattctggtttcatctataaaatggctgatccatgagcagccgtttttctgcgcacaaaaaataaagtcccaatagtgccgttgcagctttcctttgttttgaacccgctctcagcaggtgggtgccctcttttaaatcttgtaagtcctctttaccgaatgaaaagaggcatgtacgccatttaaaaatgcgggctcccaaatcaaaaaaatgttcggtcaaaactaggtgtacaactaacacatcaggactttatttaacttgtcaaaatcatatcacagacgattttgattttcaagaatccaactgcacattcagttcttaacttttttcttgatagaaagatgaagctcgtcaagctgagcgtcacttacttctccaggcgcctctgtcatcaggcagcttgcacttgccgttttcgggaatgcaatcgtatctctcaggttcgtacgtcctgcgagaagcataacgagacggtctaagccaagtgcgattccgccgtgcggaggagcgccgtattcaaatgcttccagcaggaatccgaactgttcagccgcttcttctggtgagaagccgagaagcgcaaacattttttcctgaatatccttttcaaaaatacggattgaaccgccgccaagctcatagccgtttaagacgaggtcataagcttgtgctttcatgtcttcaggcgctgtttcaatcagctcaaggtcttctcggacaggcattgtgaacggatggtgtgctgcgtaaaaacggccttcttccggatcatgctctaataacggccagtcgatgacccataagaaattaaacaatttttcgtcaatcagcccgcgctctttcccaagctttaagcgcagggcgccgagtgatgcggccacaacttcgaattgatccgctccgaacagcagcaaatcaccttcagcagcatcaagtgcttcaatcagcttagactgcttttcttcatcaaagaatttagcgatcgggcctttcactccgtctgcctcaaccttcacccaggcaagcccttttgccccgtagtttgcagcaaaagcgccaagagcgtcgatgtcttttctggagtaatcgccggcaccgccttttacgttgatggctttaaccacgccgccgtttgctacagctgatgagaacactttaaattccgtatcctttacaatgtcagacacatccgtcaaaagcatgtcaaaacgcgtatccggtttatcagaaccgtacttgttcattgcttcgtcatacgtcattcgaggaagaggaagcttaagttcctcaccttttgtttcacgcataacctttgccatcatctcctcagccaatgacataatgtcttcctggctcataaaggacatttcaatatcaatttgcgtaaactcaggctgacggtccgcacgcaagtcttcatcgcggaaacagcgggcaatttgataatatcgttcaatgcctgataccatcagaagctgtttaaatagctgcggggactgcggcagcgcatagaactcaccttcgtgcacacggctcggcaccaagtagtcacgtgcgccttcaggcgtgcttcctgttaaaatcggcgtttcaatatcaagaaacccattttcatctaaaaagctgcgaacagctttcgtcacgttatggcgcagctgcatcgtctggaacatagccggtctgcgcaaatctaagtaacggtgttttaaacgaacgtcctctgacacttcttcagcttgatcagaaatcgcaaatggaggtgtctttgcagcatttaatacgttcactccatcagcatgtatttcgatcgcgcctgttttcaaattcggattaactgttccctcttcacgcgccaccacttttccttgaatatcaagcacgtattcatttctgatgccttccgcgatagcaagcgcttcttttgacacatcagggttaaaaacgacttgaacaatgcccgtacggtcacgcaagtcaataaaaatcaatccgccgaggtctcgtcttttttggacccagcctttcagcgttacagattcgccaattgctttttcagttatatcaccgcaataatatgttcttccaaacaatgcgtttcactccttatcccttttggtttgccttcatcacatgtataaattcatcaagtgccacttcaatctgttcgcccgtctgtgcatcctttacattgattttgttttgggcaagctcatcttcacccaaaatcgcaataaatctggcctttaagcgatcagctgttttaaactggcctttcattttcttattttcataatcgatttcactggaaatgcctgcttctctcagtttgtacaccaatgaaacagaataatcctttgctttttcgccgagtgtgacgatatagcagtcgattcccttatcaacaggcagctctcttttttcagcatcaattgcggcaagcaagcgttcgatgctcatcgcaaatccgatgcccggtgcttcaggtccgccgatctgttcgacaagcccgtcgtagcgtccgccgccggcaagtgtcgtaatcgcgccaaagccctccgcattgctcataatttcaaatgcggtgtggttgtaataatccagccctctcacaaggttcggatcgatttcatacgaaatgccaagatcatttaagtattgtttcactttttcaaaataagcggctgattcttcatttaaatatgtcaaaatcgaaggtgccgatttcatcagctcatgatcacggtcttttttgcagtccaaaattctaagcgggttcgtgtgcagccgggactggcagtctgaacaaaattcttcgatgcgaggctcgaagtgtttcacgagcgcttctctgtagcttttgcggctatcttgatcgccgagactgtttatgacaagcttaacgttttctaaacctgctttttcataaatactcatcgcaagcgccattacttcagcgtcgattgcagggtctttcgaaccaatcgcttcaattccaaactgataaaactggcggtaacggcccgtctgaggacgttcataacggaacatcggcccgacataataaagctttgtcggctgtacaggatttgcgaacagcttgttttcattaaaagcgcgaaccgcagcagctgttccctccggacgaagcgtcaggcttctgcctttgcggtcctcgaaggtatacatttctttttgtacgatatccgttgattctccgacgcctctggcaaacagttctgtatgctcaaaaatcggtgtgcggatttctttatattgataagtgcggcaagtgtctctcataatttgttcaacaaactgccagcgatctgattctccaggcagaatatcctgtgttcctctcggaatgttatatcccataggtagacctccttatgtattccttataaaatatccaatgatcgttaatgatgaaaatgaaaaaaactcccgcccctactatacatgatagtagggacgagagttatacccgtggtgccaccctagttggaatacgttcatattcccgctcgatcctttaacgcaggttcacgttcactgcctaatggcgttattcacgcgttcagcaggaaacctccggagtgttgtttcgagaaagacgcaatgggatccgctttcagcctggggcgggttcctctctaatcatgcaatctgacctactcttctccattattggttcaaatctttcatcatttgctatgtactcaatttctattataataatgggattggggttctctgtcaagctttattccggttgtttttcctcagcgctgcttctttggacataagaccaaattcagatgctgtttccgtaagataaccagtcgtatcgggatctgcgtgatcgctgtaatgcagattcgcttcaccgtcgtgaaatgcacgtcccatttttggatgatatttcatgatttgcacacctttttgattgtatttacgcttagtataaacaaatcattttatttttatttaaaaatcagaaaggactttacgatattaaacaagaatgcttttttaatgatcatcagaaaggaggacacaatgaacaagaaatactttgtccttattgtatgtattattttcacctcagcgctattcccgaccttttcatccgttacagctgctcaaggagaagcggtcatcgcaacagatgaaatgaacgtcagaagcggcccagggcttagctacggcattacagcggaagtaaaaaagggagaacgctatccaattttaaaggaagatggagactgggtgcagatacagcttggttctggagaaaagggctgggtagtctcctggcttattacaaaggaagaccaggccagcacaagctcctcaggaagcagtgacactgtgacatcaacagaccccgatctgcggatgagaagcggcccgggcacttcctacgaagtcatcggcaaattcccgcaaggcagccaagcatctgtcattgataaagattcgggctggatcaagatatcctatcacagtgccaccggatgggtatcatctgaatatgtcacatcaggaggcagcagttcagcgtctgatgagagtgaccaaaccgaggattccggtgcgtcaacgacgggcacagtcggtgtttcttcgctaaatgtaagagcctccgcctcacatgacgcggcaattataacaaaacttgatcgcggaacgaaactgacggttctcaacgagaaaaatggctgggctcacattgaggtgaacgggctaaaaggctgggttgcaagccattaccttttgactagttctgttccagctgatgattcagcaaatgccggcagttcatcctccgctaaaaaagcctatatcatgtacggaggaacgaatctaagaagtgatgcgtcaacatcagcttcgatcgttgagcgcgctgccaaaggagattcatacaccattaccggttcaaagggaagctggtatgaaataaagcttgataacgggcagactgcttatgtagccaattgggtggtccaaacgtctaaaagcgcagaagaagcaggtgaaccgccagtctctgattccccgtctggaaacggctctctaaacaataaaacgattattgttgacccgggacatggaggaaaagacagcggaacgatcgggtattcggggaaattcgagaaaaacctgacgatcaaaacggcaaaactgctcgccagcaaacttagatcggctggagcggatgtatatgtgacacgccaggatgatacctttgtcagcctgcagtcacgggtctctacctctcactaccgtaacgctgacgcctttatcagcattcattatgacagctatgcggatacctctacaagaggcagtacagcatattactacagtcctgccaaagatcaggaactcgcatcagatgtccactcagaagtggtgaagcgttcttccattccagaccgcggcgtattattcggagattattatgtgctccgggaaaacagacagcccgctatgctgtacgagctgggatatgtaagccatccgcaggaagaagccattgtacatagcaattcataccaagaaaaagtaacagatgggatcgaaagcggattagagaaatacttccaataaaaaaagctgccttttggcagctttttttattttgaatccataatgagcgtgaccggtccggagtttgtaagctgaacatccatcattgctccaaacgttccggtctccactttgattcctttttcacgaagcaggtcattccatttttcataaagacctaaagctttatcaggtttggccgcgttcatgtagttcggccggcgcccttttttcgtatctccataaagcgtaaactgtgagacggataaaatctctcctcctatatctacaagagacagattcattttcccttcactgtcatcgaaaatacggagattgacaactttatcggctaaataagctgcatcatcttctgtatcatcgtgagtgatgccgaccagcaccataaggccttgtccaatttggccgacgacctcttcgtccactgtaacgcttgcttctgttactcgctgaacaactaatctcattttctaacccctttagttcatgacgcggcgcacagagtagatatctctaatctgtttaatacgctcgacgactttgtgcaagtgattgatattctgtatgaaaatcgccatatggatggttgccactttattgcgatccgatttgccagagacagatgaaatattggttttcgtttcattcactgcctggagcacctcgttcagcaatccgcggcggtcatacccaagaatctctatctcaacattgtattccttgcgcttttgaacttgtgactcatgctcccactctaccgggatcagccgctcttgggcttcattcgttttgacattcggacagtcttcgcgatggaccgaaacccctctgccttttgtgataaagccgacaatatcatcacctggcacaggattgcagcattttgataaacggacaaggaggttgtcaatgcccttgacacgaacgccagcttcccgttttcttccttgcgggtatggcttaggttccccagtgacttcctgaacgatcttttcctgttcttcctgatcgcgctgctttctctctttttctgttaggcggttcgccacctgcagagctgtgatgccgttgtaaccgaccgccgcgtacatatcctcttcatttgagaaattaaatttgtcagcaaccttttgaatattctccggcgttaaaacatccttcaattcaaaatccaagtttttaatttctttttcgaccagctcacggcctttttcgacattttcttcacgccgctgtttcttaaagaattgacggattttatgcttcgcttgggatgtttgggcaagcttcacccaatcctggctcgggccgtaggaatgcttagaggtgagaatttcaacgatatcacctgtccgaagcttatggtcaagcgtaaccatttttccgtttactttggcaccgattgttttattgccgatttcagagtgaatccggtaagaaaagtcaatcggaacagaaccggacggaagctcgattacatctccttttggcgtaaagacatacaccatgtcagagaacaaatcaattttgagcgattccataaattcttctgcatctgtcgattcattttgaaattctaaaatttcacggaaccaagaaagctttttctcaaaggttgcaccttcattggctgctttcccttctttataagcccagtgagccgcaaccccgtattccgctatttcatgcatttcaaaggtgcggatctgcacttcaagcggatcgcctttaggcccaataaccgttgtatgaagcgattgatacatattcggcttcggcattgcgatataatctttgaatctgccgggcatcggtttccagcatgtgtgaatgatgccaagcaccgcgtagcagtcctttatgctattcacaagaatacggacagccagcaaatcgtaaatttcattgaattgcttattttgcagcaccatttttcgataaatgctgtaaatatgtttcggacgtcccgagaagtcagccttgatatttacttcttcgacacgtttcttcacttcattgacaacctcatcgacataaagctcacgttctgcacgtttcttcttcatgaggttgacaattctgtaatattgctgagggttcaaataacggagcgccgtatcttccaattcccacttaatttttgaaatcccgagacgatgcgccaaaggagcaaaaatttccagcgtttcattggagattctccgctgtttttcctgaggcagatgtttcagtgtccgcatattgtgaagacgatccgccagcttgatcaatatgaccctgatatcttgagccatagcgacaaacattttgcgatgattttccgcctgctgttcctcttgagatttatatttaattttgccgagtttcgttacgccgtctacaagcattgccacttcttcggaaaatgcttctttcaggtcatcgagcgtcacatctgtatcttccacgacatcgtgcaaaaatccgcccgcgattgtggaagggtccatttcaagatcaacgagaatccccgcaacctgaatcggatgaataatatatggctcgcccgatttgcggtattgctcgcgatgagcatcttcagcgtacagatatgctttttcgacaaatgcgatatgctcatcagatagatagctgcgcgctttatctataacttgctcggcagtcaatacttgttcgttcgccatggaatcaccttttttaaaatgtaaactgtattgtagtttattatcaagaaaaaaacgaaagatgtaaagagcagaagttcaaatagccaaatattatataaaataaatgcaaaacaataggaaaaaagcaccctgacatggagtgctttttcgttatgcggttatccttagtatttcatcaatgttaagatgtcgtaatcttcgagcttatttctgccgtcaaggtaagaaagctcgattaagaaagcgataccagcaacaacgccgccaagttcttcaacaagtttgattgtcgcttcaattgtgccgcctgtcgcaagcaggtcatctgtaataagcacacgctgaccaggcttaatcgcatctttgtggatcgttaatacgtcttttccgtattccaagccataatccactttgattacttcacgaggcaacttgccttctttgcggaccggcgcaaaacctacgccaagcgcgtaagcaacgggacagccgataataaagccgcgcgcttcagggccaacgaccaaatcaatttgcttttctttcgcatattcaacaatttgatctgtggcatagcggtatacatcgcctttatccatcagtgtcgtaatatctttaaattgcacgccctctttcgggtaatccggtacaattgttacgtattgttttaaatccatctgttttatgtcctcctcgtactttcataagcctctgaatcttgtttcatcagcttattcagccattccttcagctcttcagcagaagaataattcagcttttgatccagttccatcagctgctgtttcgcctgatatgtttgtgagtctgttaagtcgcgtttctttgctccgctcacaacagacagcacaccattctctattttaacaaaaccgagatcaaaaaacacctttgtcatgaaattgattgtttcaacggaccagcctttatgttttgcaagctctgaaccgtgttttttcacgtcaaaagcgcctcttttcagcaagaacgcataataccatttaaagtggtctcttgcgggaaaagttgataaaaagtggtcctcatgattgagaaaaataaaatatatccgctcgggcgcctttccttccagcaaacgtgcgagcatgtccagcgaaggcggcggatccagtaatacaatatatgcaccatcgaggtcaaacgcctttgcttgatctttagaactgatgacgtgcacttctcggcgaaggtcttcagtttgaagtaatgttgttgagtcttctttgaaagagacaatggcccgtttagcagatggaagggcggaaactgtgtcttcccacgtccgttttccccttaaatcaaacagctgccattcagaaacagcggcatcctttatcataagctgcggcttttttcgattgttccattcgttgattgacatctcaccgacaatagaaattcttgaacccggtacgatgccttcttcaagctcgcctttattaaaaccgacgcaatcaagctgggacgactcgtttctgatcgtcattttgacatgagttttatttgcccctatcttgcggacatcttccagtactgcgttttctacgagaacgtgcggtttcgggttcagcatgccaaaaggagacagcatgttcatttctgcgatgctttcaactgtaatgtcttcgacgccgcagacaaggtcgacttcctgtacgggaataaaatcctcttccgtaagcgtattgtccgctatttcattcagcctgcttcgcaaatccggcacatcttcggctttcagcgtcatccccgcagccattggatggccgccgaaatgaggaagaatatctctgcattcagaaaggctctcaaataaattaaatcctctgatgcttcgggccgaacctttagcgattcccttttcttcatcaataccaagaacaatggccggtcggtagaaacggtccacaagctttgaagccacaatcccgacgactcccgggttccatccggctttggccacgacaattgcagtttgatcgagcccttgctgttcaaccatgtcaatcgcttcatccgtcattttgctgaccattttttggcgctctttgttcagctggtcaatttctgcggcaagctcttccgcttcaaacgaatcctctgacataagcaaatgaacagcgggatccgcctgttcgattcttccgacggcattcagccttggtgcgagctgaaatccgactgtttcttcgttcgcttctccgatgtctccgcctgacagcttaatcagctcttttaagccgagccgatttgtccgtcgaagcctttcaagtcctagtgttgctattaatctgttttcgtcatgcagcgggactagatcggcaatggtgccgatagccgccaggtcaagcagttcatcaggaagttcacccaataaagcgtgggcaagcttaaacgcgactccaaccccggcaagctctttaaacgggtaagtgcagccaggctgcttcgggtggacgatcgcacggacatccggaagctccggtcccggttcatgatgatcggtaatgatgacatccagtccgagttcctttgccaccttcgcttcatgcacagcggcaattcctgtatcaaccgtaatgatcaaagagaagccccgttctttaattgaacgaaacgcctgttcattaggtccatatccttctttaaaacggtcaggtatataaaaatcaacttgagccgacagtttttgcagcgtgtgaagcatcactgacgtacttgtaaccccatcggcgtcataatcgccatatatcataatcttttcttgttgtgaaatcgcctgttttattcgatctgccgcttctttcatgcctttcatttcaaaaggatcataaaaatcggcatcctttgtatgtaaaaacagcctagcgctttctgccgtatcaaagcctctttttacaagcagggacgcaacaagaggtgttatatgcaattgttctgtgagtgatttgaccttatcctgatctggtcgctggatttcccatcgcatttttgacgctaacataaattcacccctcaaccaccctattatactagagcaggctgaggggtttcaaataatattcgaaaactagtcttttttctcaatcatggctgatgcatcctgtgtgtcagtctgatcagcaagatgagtatcctcttgtttatgtattgctgttctattttctttccgcaaggtttttatttcccgcttcaatttcattacctgaaaaatgccgacagaaaatacgatcagtgctcccattaaaactgagcccaaaataacaagaatgagcggccattctgatcttccaaacaggtaatcaacttctacggatcgaacattaatgactgcgaaaatagcgacaattaaggtgaaaataagtgcgaaaataatggtccattgtttattcattctcttttcccccaaacttcttattgaggtaactttccccatcaagactggttttaaacatggcttaacactaggttaagctccctttgctgttaatttttcccggatcagcctcttcagtccggttccctcaccggaaatcacaagtgtatcgccttcgtcaatgactgtttcagagctcggattcagttgtttatcctgattctttttaacaattgcaatgaccgtcacatgatattcctgacccacattcaaatcaccaatcgtctgatgaatggcaggcgctcccgcctctgctttacaccactctataatcaaatcatcaagggctgactcgacctgttctaatgctttcggtttatatgccattccgccaagaattgcagacatttgccttgcttcagcgtcatcaaactgcacggaggcaacacattcctcatggtcgttttcgtcaaaatagtaaagctctctccgtccgtcatgatgaatgataattgaaattttatcacggtttctagtaatcatttcaactttttgtcctatgcccggcagctctgattcgcgaaccctcatatataaaccctcctacatatctgaaaaccagccataaacacttttaacaccatatatatgtttaaatgtaagcgtatgtcattatagcaaatgtctattttaagttcaatgaaacttcaaaaaacaggctgccctgcagaggacagcctgatattttttattgcgccgaatcttttttcagttctcttcctttccatgcaagccaaatttgtgcggcaatgtatagagaagaataaacgcctgttaacagcccgaccaataaagcaattgagaagttagtaatagaagatgctccaaagatcagcaatgtcacaacaacaatcacaacggttaatacagtgttaattgaacgtgtaaaggtttgctgcaggctcaggtttactatatggttcagatcggcaaatgttttcggcttacgctttttcatatgctcgcggaccctgtcaaatgtaacgattgtatcgttaatggaatacccgattatcgtcaagatggccgcgatgaacgtaacatctacttcaagccttgtaatactgaagaatgtgacgataaagaatgcgtcatatagcaatgaagcaatggcagcaatcgccattttgtattcgaatcggattgaaacgtaaataatgatgccaatagaagctatagcaactgcgtacagcgcatttcttgccagctccttaccgactgtcggtgaaactgtgctgacatttggctcagacccgtatttgtctttaaaatacgtttttacttttgctatggtttctttatctggcaccccgacaaaacgggcaacaccgatattgctcttttcgcctgacagaactacagtatcagggtccatacccagagattcaaaatccttctcaacttgctctgtcgtcagcttatggtcgctttgtacttcaatccgtgcaccgcttgcaaagtcaatgccaagattcagcctgaacacaagcaggataataatcccggcaaccgtgaccgcactggagaaaataaagaagtatttgcgtttgctcgtgaaatcccatttttggaatggcgtatgcggctctgtattttcatccgtatcctgaatatccatgatatgtttcttattgacaccaaaccagccttttttccgatcaagccatctgctttccacaaggagagcgaggagaaatctcgataagaaaacggcagtgataaagcttgtcaaaatcgataggatcagcattgtcgcaaaccctttaacagagcttgtcccaaagataaagagcacaaccgctgcaataatggttgtaatattcgcgtcaaaaatcgtcgcaaatgaccgtctgtttcctgaacggaaggcagagcggactgactttcctagcttgagctcttctttaatccgctcataggtaataatgttggcgtcaacagccatcccgacacctaaaatgagagcggcaattcccggaagcgtgagtacggcattcatccagtcaaagatctggagtgtaatgtagatataaacagacagcgtaatcaccgcgattaatcccggcagacggtaatagaaaagcataaataagaaaataattgcgataccgacaataccggcaaacaccgtatcatggagagcctgctggccgaattgtgcgcctactgatgtcgaatatttttcagtcagtttcacaggaagtgcgcctgcatttaaaatgctggctaaatcttttgcttcttgaaccgtaaattgcccttcaattgtaacatcagttgtgtttaattcctggcttacatttggggcggatacatatttagggtgctctttttgaacctcttttttaaaggagtcccctttttcgtaatccatccaaataacaagctggttgtttggcgccattttcatgacctttttggtcacttcgccgaatttatcagcatctttcagtttaatgctgacaatcggttcatttgttttggcgtcatacgtttgtttagctccgttttcgacgaggtcagagccattcagcaattctttgtcattcgtatctctgaaagaaagctgcgcttcagtcgccaaaatttcacgcgctctgttttggtttgtcacaccagcgagctgaacgcgaatccggttattcccttcaatttggatgttcggttcgctgacaccgagaacattggcccggcggttcaatgcctctactgtgctgaccagaacgtcttttgtgattttgtcacctttttttacaggctgtacatcatacagcacctcaaatccgccttgcaaatccaatcctaacgtaatattgttagcggcaggcttcgtaaagtagcccaagcccgtgccaatcaatagaacgaaaaggaaaaacgcaatcaagcgtccttttttcattatgtatatcctcccttaaacctgtgcgaatcaacctgctatctcagcagttcttccaatgcttcctggccctcttcactgcccagccaattagacgttttaaatgactcaacggttgcatagttcataaattcgccaattttcactgataaaatatcactcgccagttcataaatgttcagttccgttttctttttccacttcttatctgttaagtatgaccacaaactttcgagttcaacatcatcatacccgagaatcttaaactcttccagtttgctgtaaagaaacggcctgacgtggtctttatatagatcggctggatgcttctccacgaattccacgctccttttttattgtttttcaagaagacttgtcatgcttggacgatatatacgcatatctttattgtatatgattccaggtagtttgagaaggcagggggtaaaaatggcgaaacagacgtttttaaagggcactcttatccttatcgcagcaggaatggttacaagaatgctcgggtttgtcaaccgggtggttatcgcccgttttatcggtgaagaaggagtcgggctttacatgatggcggcgcctaccttcttcttggccactacattaactcaattcggtctgccggtcgcgatcagcaagctagtcgctgaagccagtgcgcgcggagatcatcaaaaaacgaaaaatattttagtcatgtctctgaccatcacgggagtgctcagcctcatctttacaccgctgtttctgtttttcgccccggttatggctgaaacgatgctgacagataagcgaacactgtatccgctcttggccattacgccggttgtgccgattattgctatatcgagtgtgctgaggggatactttcaaggaaaacagaatatgaacccgcttgctatgtcacaagtccttgaacaggttgtccgcatttcactcgtggctgtctgcacaacgatttttctcccttacggaattgaatatgctgcagcgggggcaatgctatcctcagtggcaggggagctggcatcacttctttatttattcgtttgctttaagtataaaaagacaattaaaatcagaaagcattttttccagtcaattaaaaacggaaaacaaacctttacccaattaatgagcgtgtcccttccaacaaccgggagccgctttatcggaaacctctcttggtttttcgagccaatcgtcgtcgctcaaagccttgccatcgccggtgtggcaacagttgccgcaacaaagcaatacggggaactgaccggctttgccatgacgttgctgactctgcctagctttattacatattctttgtcgaccgcgcttgttcctgcgatcagtgaaggaatggagcagaaaaaattgcaggtggtggaataccgcttggaacaggcgatgcgtctctgtctgctcagcggaggcatttcagttgttattttatttgtatttgcggatgagctgatgagagtgatgtacggttcttcaggcgcagctgtatttataaaagtgatggccccgttttttctgctttattattttcaaggcccgcttcaagctgttctgcaggcgcttaatttggcaggagctgcgatgatgaacagcttaatcggagcgctagtcaaaacaggccttatttttgtccttgccacaaggccttctcttggcattatgggcgcggcattagccattgtgacaggcatggtgctcgtcacgctattgcacgcagcaaccgtaagcaaagtgctgccgatcagcatcaaaatcaaggagtacgcgctcagcttcgctgttattgtaatttgcggattcatcagctccgccatcaaacattatataagctttggagcatctgaggctgtcaatctagccggatggattgcggtgagcgccgccatttatatgatcctcctgctcgttttccgtttaattaaaaaagatgagcttcgccgcattcccattatcggacgtctgatcatccgataatagtcacgtgcggtacccatctttttcgtcaataaataattctccgtctgtaaacgagcaaaatgaaatatctgaagggtttgtgtatccgtgtttttgcaaactttcaagcagccattttctatctttactgattctggacaggttttctgtttgaatgaagccgtctataatgagcggcatttcgagctgccgatgctctccgctattttctttctttacaatagtcagtttgcccgacggctctaaaatggcaaatgatacgtcagctactctgtcgacgctattttctctgagttgaaccattaaatcatcaaaattatatcgctgtgatttcatggcttcttcgtcaatttttccatatttgataattatagtcggcttaccgtcaagaagctggcggacttttcggttttttaaagaaaagtatgccaaagtcacttgaatgatcattaatacaagcattggcaaaatggtatgaaatagatgatcgtctacgttttctatggctaaaacggcaatttcagccatcatgataaagacaacgagatctaaaatactaagctctccgatctcccgtttgcccatgaaacgaaaaatgaccaatatcacaaaatacaatacgactgtgcgaaacgcaatagtgagaagctcttccatcatgcacctccaactcattataggttgcaacaaaatgatcaatttatgtaagaaaaaccgattgcatttcacaaagcttttacgtctaattcaagggataagggaatacatttttacaaagacgagccatcagcatgtctgacggctttgtgcaaaaagaacagaagccttttaatacaggcagagaggagacaatcatggaggaaacgaaacaagttggaaaaggcattctttacggcttaatcgccatattttcagccatgctcctgacaagtttggcggtttcacttttattgaccgcaacctcgctggaagaatcatcatttaactggctgatcacagctatctcatttctctctttatttatcggcgggttcatttcaggcgggaaaggcaaggaaagaggctggatgattggcgcattgaccgccttaagtttttctctgattatcttattgtttcagtatttaggattcggaaagacatttacagcagaacagctgatcttccatctgggatttttaggggtgtgcatgctgggcgggattttcggcgtgaacatgaggggaaacaggtcttccacataaaaaagagcgggctcacttgcccgctcttttttgtttgctatgtatagctcctgctgttattcagcagcagaaacttctctgatcgcgcggcggtcgaacgtaagacgtgtgttatcaccagtcttaattacgactttgctttcgtcgatagagtcaacagtaccgtgcaatcccccgattgtcactactgaatcgccttttttcagttcctcttgcatttggcgtacagccttttgctgcttttgctgaggacgaatcagcaagaagtaaaggaccgcaaacattaaaataataggaaccaatgtacctaaagtgccagtcatcattttcacccctttctgtaagcctgttatgtttatttagaagcttttcgcatttggcttgttatagccgtaacgctcaaagaactcttctctgaaatcacccagacgatcctcgcgaatagcctgtcttacctgctccattaagtgtaacagaaaatgaaggttatggtaagttgttaatcgaaggccgaatgtttcattacagcgaatcaagtgcctaatgtacgcgcgagtgtagtttttacatgtatagcaatcacactcttcatcaatcggacggaagtctctttcaaatttcgcatttttcatattgagtcgtccttcagcagtaaacactgtgccgtttcttgcaatccgtgtaggcagcacacagtcaaacatatcgaccccgcggatcgctccgtcgatcagtgcatccggagaacctactcccatcagatatctcggtttatccttcggcaagagcggtgttgtaaattcgagtacacggttcatgacatccttcggttcacctacagacaatccgcctatagcatatcccggaaaatcaagcgaaatcaagtccttcgcactttgtgtccgcagatcttcatattctccgccttgtacaataccaaacagcccttgttcatcctgacgattgtgggcattcaggcagcgttccgcccagcggcttgtccgctcaactgacctcttcatgtagtcgtactccgccgggtatggcgggcattcatcaaacgccatcataatatcagagccgagtgcgttttggatctccatcgctttttccggagataaaaacagcttgtctccatttagatgattgcggaaatggacaccctcttcctctatattacgaaacttgcttaaagaaaagacctgaaaaccgcctgaatcggttaaaattgcgcggtcccagttcataaatttatggagcccgcccgcttctttgacaatgtcttggcccggacgaagccatagatgataagtattgctcaaaatgatgcctgcatccattgctttcagctcttcaggcgacattgttttgactgtcgccagtgtgccgaccggcataaaaaccggcgtttcaaaggagccgtgaggcgtatgcactttgcccagccgcgctcctgtttgtttgcattcttttataaattcatagcgtattggttgttcagccacttttgatgaggcctcctgttctcaaattatataatcagcatcgcgtctccgaagctgaagaaacggtattcctcttccactgcatggttataggcacgcagaatgttttctcttccagcaagcgcgctgaccagcataatcaatgacgatttcggcaaatggaagtttgtaatcattccgtcaatggctttaaattcatagcccggataaataaaaatagatgtccagccgcttgatgctttaaattgcccgtcatgttccccggcaatcgtctcaagcgtgcgtgtcgaggtcgtgccgacagaaatgatccgaccgccattttctcttactttgtttaaggctgcagccgtttcttctgacatttgataaaactctgcatgcatattatgctcttccacttcatcggcactcacagggcgaaacgttccaaggcctacgtgcagtgtgatgaactcaatttgcacgcctttgtctttcagctgctgtaagatttcttccgtgaagtgaaggccagctgtaggcgcagcagcagagccgatttcttttgaatacactgtctggtagcgctctttgtcatcaagctgttctttgatatatggagggagcggcatctctccaagggattcaagcacctcgtagaaaataccgtcatattgaaattccatctttctgccgccgtgctcaagctcttccgtgcagattgccttcaatcttccgtctccaaatgtgacaacagttccttttttcacccgtttcgccggtttggcaagtgtttcccatttatcaccggtttcctgtttcaacaaaagaagttccactttcgcgccggtatcctcttttgtgccgaataaccgcgcaggcagtacccgggtattgttcaggactagacaatcgccttcgttaaagaagctgataatgtgtttaaacgagctgtcagtaagctctcctgtatgtttatcgagcaccatcagccttgaagcatcacgctgctccaacggtacttgtgcaattaaacgttctggtagttcaaaatcaaataaatcgactttcatgatgatttcacctttattctagtcttttgttatttcattctgccaaaaagattaagcaaaattgataataccacacttataataatacaagtgacaaccgggaagaaaaacgtgacatttcctttttttacaaaaatatctcccggcatcttgccgacaaaatgcaaaactgctccgataataagcaaaacagcaccaagaatcataatgatcttaggaaattcagtcatatcggggagcctccatttggaaatgatgataaacggccggtgtcacgatccttccacgcggcgttctttgtataaatccaatttgcagcagatatggttcatatacgtcttcaatcgtatgcgattcctcgccgatggtagctgaaatcgtatcaaggcctactgggccgccgttgaatttttcgatcatgcccatcagcagcttatgatcaatatgatccaaaccgaggcggtcaacctgaagccgctccagcgcattctgagaaatgtcttccgtaatcctgctgtcacccagcacttgggcgaaatcgcgcacccttctcagcaggcggttcgccacgcggggcgtccctctcgatcttcttgcaatttcaagagccgacggtttatcaatctcaacctcgaatacatcagcggttcttgtgacaatatccgccagttcttcttgtgtatagtactcaaggcgagacatgacgccgaatctgtctcttaaaggagccgtcaaaagccccaccctcgtcgtggctcccaccagcgtaaaaggcggaaggtcgaggcgaaccgagcgggcagatgggcctttgccaatcacaatgtccaggcaaaagtcttccattgcaggataaagcacctcttcgatcgatctgtgcagcctatgtatttcatcaataaataatacatctcccggttccagcgccgttaatatagcagccaaatcaccaggcctttcaatcgcaggccctgatgtcgtccgcaattccactcccatttcattagcaacaatcgaagcaagcgttgtttttccgagtccgggcggcccgtacagaagaacatgatccagcgtctcctgtctcattttcgccgcatctataaacacgcgcaaattttcttttaccttatgctgcccgatatactgtgccagattttgcggcctcaggctttgctctatcactgattcatggttgtctgcttcacttgagacgagccgttcatccatgaacatcaccttactttaatagtttttgtaatgcttttttcacatattggtctgttgtcagcccaatttcttctttaaggtgaggaagcacctttttgatttctttttcagcatatccgagaaccctgagggcttcaagtgcttcttcaagagccgtttccgctgtttgcttttcaagcctttcttcatgattaaacagattttcaatcatttcaggcacaacatctgccagctttccttttaaatctagaataatctggcgtgcggttttttttcctactccaggaaacttgaccaaaaaagcttcatcttcattttcaattgcttgaatgaccgctccgggatcacccgagcccaagatggcaagtgctcctttcgggccaattccggtcacgtttaacagctttgtaaagagcgccttctcctctcttgttgaaaaaccgtaaagcgaaaaagcatcctctctgatatgatggtatgtaaaaatcgtttcctggcttctctccttatatataaagggattcggcgtgaaaatctgatagccgatgccgccgttctctatgacaatatattggggagatacataatcaatcgtccctttaacaaattcaatcacgcaaattcacctctttgactgttcttcattgtaccataaaaacagccaaagtcttatagaaaagttaacatacgttcgcttctctctcattctttcacgaaaaaaaagacatgaattcatgtcttcaatcagcggacgttacccgctgtatgtcttcatatgttcgatgacatcctcaaactccgcttttgtccgaaatggaatgcctttcagcagatttttttgcatatggctttccagcctttctaaatcaatttgaaaaaaagactgaattggttcggaagctggctcaggccgcccatgaaaagtggaaatcactccattatccgatacaccgatatacccgttgaccttgctgagcggagaaatatcgtccatttgcttccggaagagcacatatccctttttttgttccacaagcgtccatccggcataagctgcccaaaaatcatccatagaaaacactttttcatgcttatgctcaatgctgacatcgccgtccaaatacaccttttcaagctgcacatgcacctgcagcggctcatagtgctccacttccgcgccaagtgcgcgggaaggagctcctattaaaaatactgccgctgagcaaagaatgcccagcaaaagatacgccgtgctgaatcgtttcaccctctacacctctttgcacacgtttatgattagtttgaccaaagaggctactgcttaaccgttttatcaaaatttgtctgcacattttccctgacaaaccgttcctccgtatacacatctgtgctttgctcagaaattgtcaagaatcgcgtcagaaaggcactgaaaaaatacaatgccgcaaagatccaaatcacgccgcctgcaccgagcggcccaatgaaaagactcacgatgcccggcgcgataaacgcacataaaccagatcccaaattcaacactgacatggcagcacctttattatcaggtgcaagcgtcggcaaaagcgcgcttaatgggacgtaccctgctaaagccgcgccgtagcagcaggcgataatcatgagcacccaatactgatgcccgatcagctgaggcgtgtaatacagcgccagcgtaaaaataccgcatccgacaccgccaaaccacatgaccgtattgcgccagccaagtttatctccgactgcaccgaaaatgatattaaacacaatattcacaaaaaacagcgtcccccatatttgcagccattccgaaaccgaatacccgtatcgtgctaaataagtaggaagaaagatggcaaatccaaattgtcctatcgcattaatcgtcttgaccactccgccgatgcctaccttagggttttcaaacataattgtaaatgccttcgacaattctttccatttcggctgatcttgtttttgtatcggagtaaatttatctttgttaaaaaataaggcaagaattccgcctgccgccacaaacagtaaagcgctccaaagcgtattgatttctccaaaggccggaactgcatagctggaatagaacgggcccagcacgttaaggccgcacgtaaacataaaccaaaaccagccgacggctttgccgagaatattttgagaggtgctgtatgacacccatacgagaaaagagtatgcaaacagcggatatcccaagcctctaagagcatagctgcccaagagagccggataatacatatgaggaatcgcccagccgataaaagcggccgaaccgaggataaatgcaagcaatccgacagtcatcgtttttctcggcccccaagtttggacaaacgttcctgaaagccaagctgagatggtgacagcaatgccgtacatggtaaataacgatgcggattgctgcatactgagaccatgatcaacgagaaaaggagacagccagccttgttcgaggccgtctccaaccataaagatgacaacgccaatataaccccaaaccatgtgagaaggaattccgattttgttcaaaacatttcctttagcatgtactgtattcattttctccaccgcctacttaaagtatcaatggagtatatacccaagcttgctgaattgtaatcctgttagattaaaaagcgattttttcagtgtgctcaatgctgacaggcatgccaaaagcaagcgattgctgtgctgctctggcgatccttccggcctgtaaaccgtcattgccggtgcagggagtctcctggtttgtgccgatcgcttctgcaaaacggagaatctcctcctcatatgaatccttatagcgttcaaggaaaaagaaatgcggtttatccttcatcacaaaatcagctgttgacacctcaaccgttgtcggcctgctattatcagccgctgcagagcctttcgtcccgaaaacctcaacccgctggtcatatccgtacacagcttggcggctgttatcaatcacagccatggcaccgttttcaaaagtcagtgtaataacagctgtatcaatatcacccagctccgcaaaagaaggattcaccaaagctgcccctttggcatacacttccgtcacttcgcttcccataatatatctggccatatcaaaatcatggatcgacatatccataaacaatccgcctgacgtacggacataatctatattcggggttctgggtcccgggacgtgatttttaataaatgaggtgtaccgatttcaccattttcaacaatcgttttgattttcttaaaatgaggatcaaagcggcggttaaatccgacttgaagtgttacaccgtgtttccggacagccgcaagcgcttcactcgtttcgtccagagagaaactaacgggcttctcacaaaatatatgctttttcgcctcggctgcttctttgatcatctgtgcatgtacggctgtaggagagcaaataaaaatagcatcaatatcaggatcatgtaataaatcacgataatcagaggttatgtattcaatctgatgactgtcggcccagctttttatacggcttgcctgaatgtcagagactgcttttattttcatgtgaggaatccggcttatattttgaacatgaagtttgccgatgcggcctgcaccgataatccctgtcacaatctgttttgtcatggcttcttcccccttgatcattcacgaaagcgctttatttaaaattaatactatcccatttgtaagcgcttttcaagaatggaaattaaacgttctatgtctcttttatcacaattcatgcttataagtagccttcttcttcaagaccagatacactagaattaggctctttttcctgaacagtttatgattttcctataaacagctgcataaaatagagcaaagaaggtgaatgaaatgctgacaaaagcagaggcactggcccataccgtcatataccgcaagaacagcagatttgataaagtcaaagagaaatccgaggaattaacactaatcggcaagggaagaagcgcctatgtgtttgccttaacagaaggcggtcgaaaaatggcgctgaaagtattttttccggaatatcaagcgacagcagtcaaagaagcagcgatctatgaaaaattagccgggtccgcattctatcctgacatttacgaaactggcgattcatttattctcatggaatatattaaaggtgaaaccttttataactgtctgaagaaaggcattgcaatcagtgatgacatgattcagcaggttgaagaagcgctttctgacgcccgggcagccggactgaacccgtcagatattcatttgcggaatctgatattgacagaaaccggggcggtgcgggtgattgatgttgcgagatttgagcagacaaaaacatgcacgcagtgggacgacttaaaatccgcatatcatgcactctacaaaaaaccgatattccccaaaaagattccgggtttttggctggagatcatcgcatttttatataagaaagattggtttcaaaagcatttcgcacagcggaaaagaaaatattcttaaatcaaaaaggcagccgcacaagcggctgcctttatcatgtattttttactttctgacggcagaaatcagtttcatttgttcaggcgacagcttaattcgatagcctctcacagttaagtagaccgcttctgggtccttctcaccggaatgacaatacgttttttccatttctgtctcccctcaccctttattggctttatttcatcttatcattgctttattaaggtagttttaaagaaatgtaaagatcatatgaatccgatatatagtaaaatgagagaaaaaaagggagagagtcacattaagacacgcagcaacatcccgcttattatgtttgccctgctggtcttcttcggcggcgccatctattggatgttattttcactaaaaaacgttccgaaaggcaatctcgtccaatcggttgattcgccggacggcagctatacgttaaacacttatgtatccgaaaacatcttgagcttagatgcagccagaggtgaacttgtaaatgaaaaaacacttgtcaagagaacaatctactggaattacccggacagccgcccagcagtgacgtggatcaatcacaatacagtgaaaatcggcaatcagactttacatcttgatactgatgaaacgtatgattggcgaaaagatgatcattggatccgtgaaaaaccgccgcaggcgtcagtgaggtgatgaaacatgaataagatgaacggaacaaatgatgacaagcatttcaatcattttgtgattgctttatcctttatatacggtttgactgaactaggctatttgttgctgaaggattttataacaattgccataagtttgcctctgtagaaaaacgcagcgtagtcgatacgccgcgttttttctttttcccttcctcttcttattgttaattacaggtcatataatgtgacaaatcgattgtagaaatagttcgattagaccaaaatcctttttatacatgtattcgaatttgaagtgagggggaagcttgatggcagattttgttgctagtttgaatgcggtcttatggagtacgcccgtcatttatattttattgggaattggattcaccttttcaattatgacccgttttttacaagtccgacatttaaaagaaatgattgttcagatgttcaaaggcaagagctctgaagccggcgtttcatctttccaagcgttatcgattgcgctgtccggccgtgtgggcacaggaaacatcgcgggagtggcgacagcaattgcattcggcggacccggtgcagtgttctggatgtgggcgattgcctttatcggggcggcgagtgcctttgtagaatcaacgcttgctcaaatttacaaagtgaaacaagacggtcaatatcggggcggccctgcttattatatagaaaaaggcttaggcattaagtggtttgccgtcttatttgccgctgctgcccttattgcaatggcctttctaatgccgggcgtacagtccaactccattgcggctgggatccaaaatgcattcggcatctctcctttcgtcacagggtgtggtctggttttattattagggttcattatttttggcggcgtcaaacgaattgccaatgcggcgcaaatgattgttccatttatggccattggatatatcctgctgtctttgattattattgtcatgaatgtgtctgaattgcctgctgtgatctcattaatattcaaaagcgcctttgcattggattccgcttttggcggcttgatcggcatggcgatttcctggggcgttaaacgtggcatttattcaaacgaagccggccagggaacaggcccgcatccggcagctgctgcagaggtttctcatccggtcaagcagggactggttcaggcattttctgtttatattgacaccttgtttgtatgttccgctacagctttcatgatcttgtttaccggcatgtacaatacccaggctgcagatggttcctttatcgttcaccagcttaaaggcgtagaagcaggacctggtttcacacaagcggcaattgacagtgttcttcccggattcggtgcaggctttgttgccatcgctttattcttcttcgcttttacaacaattatggcgtactactacatcgcagaaacaaatatcgcctatttagcacgaggcagagaaagcaaatgggcgatgcttggcttaaaactgattattttagccgccacgttctatggtactgtgaaaacagcttcacttgcttgggcattaggggatgcagggcttggcattatggtatggctgaacgtcattgccattgtgctgcttgccaagccggcgctccttgctttaaaggattatgagcgccaaaagaagcagggcttagacccgatctttgatccaaaagcgctgggtatcaaaaacgctgatttctgggagaaagaatacactcatgaaagtgaacgtgtctcctgaacatactaaaaccggcccgatatgacctcgtgccggttttttatgaacgatagtttgtatacacttcttgaacatcatcgtcatcttcaaggacgtctattaatgtttccagcttctcaacagcctgatcatcggcttctgcataggtattgggaagcatggtcacctccgccgaagaaattggatatttcgattcgagggctgttttcacctcttcaaaatgctcaggctctgtgaaaacctcatataggttttcttcaattcgcagctcttctcctcctgcttcaagcacatcaagcatgagctcatcttcttctatttgccattcagtacggtctatcgtaatgaacccctttcgttcaaataaaaaggctacacatccgctttctcccagacttccgccatttttattaaaggctgtccgcacatttgacgccgttcggtttttattatctgttacgcattcaaccatgacggcaatccctgaagggccgtagccttcataggtgatttcttcatagctgcttccgtcttggcctcccgcagcttttttaatggcccgatctatattttcattcggcatattggcgccttttgctttttcgatgacaagacgcaatgctgaatttgcttctggatccgctccgccttctttcgctgccacatagatttcttttgccagcttcataaatattttcccgcgctttgcatcctgtgcattttttcttttttgaatgtttttccacttggaatggcctgccatgttttcaccttcttttacattttctatgtacactttaatgggaattgttcgctgatgcaaagaaaaaggctgccgaatatccttccggcagcccttccttcctagcggttgttcattttatgaagttttctgaacagccctttatctgttgatacttggacgtcacggccatttgcatagttgcgcgctgcttttacgacattatctctgtcagactttgtgaactctctgtggcttttgactgcgataactactcggtcatcggataccataacttgtgtgtcattgacgtttttcacttgtttcacacggttggcaatttttgcagccagtcttctgttttcttggttgtcatacccgttgttcgctgcattccgattcatgtttcggttattcgtgttgttatatgttccgtcagttgccaaaggaacacgatcgtcagcagtaacacggtcacggttatttacattcgtggtgtttcggttaccgtcgttctgatcctccattaattcagaaacaggaccatcgtggtcgattccgtctccctgtctatcggcgtcattttcatttgtataatatccgattggacgggtattgccgttattgcgcgtatcattcatagcattatcgtttgctccgcatgctgttaagccggctgtcattagaatcaggctagcgatcgtcatttttttacccaatggaaaaaccccccgtggacgaattgagcatgtttgctcgcttttatcatgtgcgtatggggggcatgttaagcgtgtcagttctctccatttggcagtgatcagcttgaaaataaaaaaaggaacgatttacatcgttccgaacaatcactcattttcttcttccggccggccaaacatttggtttacagaaggctggttcgtcattggcatagaaactcctgccgaatatgggtttggatttgggttagctgtgccatatggcatattagggcttccataagctcccattcccgaatggccaggcgcagagaaatatggctgatgatcaccgtcacagccgcagtcgtcatgatctttgtatggcatgtaaccatgagccgcagcaggctggtatgctcccattacttggggagtgccgtaataagggccatacggcatatgtccatacggagatccataagccggagatgcgtattgcggcgcaccgtatgaaccgtaatgtccgtgatggctgttttcatgatgctggttttcataacccgggtcatactgaggcgatacaaatcctggctggtatccatgcatcggatgcattggataagcttgtgccggatagtacggatagcataatcctgatcctggaagaattggcgaaacaggcaccggacacggtacgaaatgagccggataatgataataaggctgaacagccggcatcggcatattcggaactgtgtgatgaacgttttcctcttctacaccgcctacctctggcgcctttggcatattaggcatattcggataattagcattttccatattactcatagcctcctgttgtggaaattggtcttgcatatgatacatatgatccatatttccgtcatgatgtttttttggctcctccggtttaggaggcgaccaaggctggaaaagctgtttcatatcataataatcgttcacatcagcttcagggtacacattttcctgcaaattaggcatcggcgggacatacggcatggacttcttttctttcggctttgtgtcttctacatcgacaacggatttaggcttctctttcgcatatggatgttcttgcttcacactcccggccgcaggacttttgcccgcttttggctcttttctgaccgggactccttctgacggcacttttattttcattccaggcatgattaagtctggattgctaagctgtgtattgagttttttcacttcctcaacatcgactccgtacttttcagctattttccagagcgaatcgcctttttgaacgatatggattttcaacgttttcccctcctatgcaaaacgtgaacagttcagctgtgattacaatatgtttcttcacaacatatgcctgaacaaaagaagttatgagtaaaggaagggaaaatatttctgatctacgtgatcgaaagcattcgattcagggcaaggagtgcatcttcctgaatggcttttggcaccttgatgacgcctgaaggttctcctttttcaatttgttccagcgaccacaacaaatgcggcaaatcaattcggttcattgtcaggcaagggcacatgtcagggttgagtgattcgatttgtttatctggatgctcgtgaatgatccgcagaacaagattcatttctgtcccgattgcccacttgcttcccgccggagcctggttgattgtgtcgataatatatttcgttgatccgttatcatcgcttagtgtcacgacttcgtgtgaacattccgggtgcacaatgatctgaatgtcggggtctcgctctctcatatcatggatatttttagtggtgaatttctcgtgaacagagcaatgccctttccacaaaatcactttcacattcgtatgcccggattcagctactaattcatctttcatcggatcccacacagccatatcttcaagcgcaatgcccagatcataagccgtatttctccctaaatgctgatcaggcaaaaataaaattctttttttctgtgtaaacgcccattcaagcacttttttcgcattcgaagaagttacagttgctccgccatgctttccgacgaatgccttgatctccgcagtggagttcacataagttaaaggtatgatcgtatctccaaatatatgctgaagcttcttccatgccctattggtctgctgcatgtcagccatgtcagccatagaacatccagctctcatatctggcaggacgaccgtttgctgctcgcttgtcagcatatcggcggtttctgccataaagtgaacgccgcaaaatacgatataatccgcttctttgtttttttccgctacttgggccaattgcagggagtcgcctgtttggtcagcaaattgtatcacttcatccttttgataatgatggcctggtataaagagcctgctgccgaactttttcttaatggcggcaacgcgcgtttccatatcctttctcgatagttctttataactttcgggcatcatatcattcgattgtttgatcacatcaagaattgacataacggcattcctccacagattcatttgataacgtaacatccatgctgatatctaaacttttgacggaatgagtcagaaatcctaatgaaatataattcacacccgtccctttaaaagcaggcaaagattctaacgtaatcccgccagaggcttcagtttttatatgagccggtgtgagctttgcaaaatgacggaccgtatcaggcggacagttgtcaaacataataacatccgctccagctgcaattgcttcccgcagctgtccctccgtttcaatttccacctcgatatttaccatgtgccctgcggcctgacgggcttttttgcacgcctctaaaatagagccgcatgctgcgatatgattatctttaatcatgatgccgtcatacaaaccgaatcgatgattatacccgccgccggctctgacagcatatttctccagcattctgagccccggtgttgtttttctcgtgtcacaaattttaatctgttcatcatccagacaccgaacagcctctcttgtcattgtcgcaattcctgacagtctctgaataagatttaatacgacccgctctcctgaaaggagcgcagctgcgggaccgtgtaactcggcaatcacttcacctttatgcaacatgtccccatcttttttgtttaaaatgatttgaacattttcgtccaataacgaaaagccttcttttatgatcgctgctcctgcaaaaataccctctgactttgcaacaatctccgcttcacagctctgttctccaaaaatagactgcgatgtaagatcccctgtcccaatatcctcaagaaaaaagtgattcagtaattttttcagctgtaaatgattcattgttccaaatcccctcgttttttctgatcttcgttcctttttttgtatggacaatttgtcttccttgccagcccacctcagtatgaggaaaatcggttcggaagtgagcccctctgctttcctcccgcaaaagcgcagaaaacgtcatcagctttgcagtttgccatagatgagaaagttccatctgccgaattgtgatatccttcacatttacttcctgaaaaggcagcgtatgaagccagatgctaagctcaatcaaactgctttgttcccgcagaatagacatgtggcttgtcattttgctttgcagttcatgcacctctatatccggcacctcgtagaagacactggtttctagccctgattgatattgcctgttataagccggtttttggataatatgctctgctgccctttttccaaataccagcgcttccaataaagaattgcttgcaagccggtttgctccatgtaaaccggagcatgctgtctcgccaatcgcataaagccccggcactgtcgtttctccccagcgattaactgaaacacctcccattaagaaatgcattcccggagcaacaggaatttttccgctgtggatatcaatccctgctttttcacaaatagcggtgatagtagggaaacgcgtttcaaaatcagaaatcgcactgaagtctatataaacgcgatttccttttgccatttcttcgtgaataacccgtgagacaatatctcttggagccaggtcacctaaaggatgccgttcagccataatcctgcggccgttttcgtctactaaacatccgccttcccctctgacagcttctgaaacaagcccgtagaaaacaccatttttcacaagcagtgtcgggtgaaactgagtaaactccaaatccgttaattccgccccggcccggtaagccagagaaagaccgtcacctgtgacagtgagatcattcgtatggtgaagaaacaggtttccacagccgccggcagccagcacaacttcgtctgcgtgccttaccttgagccgccctttgctgtcttttgtcatgacgccgatacatcgtccgtcctctataagcaaatctgctgccatttcattctcgattaacttgattttgctgttgatccgtttgagcaaataatcgataagcagcctgcctgttgcgtctccgcctgcatgaaatatgcggttgtatgagtgggccccttctcttccaagacaaacaccgcctcgttcattgcggtcgaatggaaatccacgctccaataggctttgaaccatcatttttccatcatgtaatacgtctgctgcaatagctagattattatggccgcatcctgcgtataacgtatcctccagatgggcttcaatcgagtcatcttttgcataggccgcagcaatcccgccttgtgcatagacagaattgctgtttttgacgcttttttttgtgataacagtcacttcgtatgagggcgggaaagctgcagctaaggaaagtgccgccgcccctgaaccgatgactgcaatcgtctttttagacatatgccatcctcctgttgtttacacctgtcttgacacctatatttacacaaggataaaataaactcaagagttttttatggagaacggatggaggaagaccggatgatttatttagattatgcagcgacaacgcctatttgtgaggaagcccttactgtatatcagaagcttagtatggatatgtacggaaatgccagcagcctgcatgatgcaggaggaaaagcaaagcacatactggagtactgccgtgaaaaaatcgccaacatcattggcggagaagcaagcggcatctattttacaagcggcggcactgaatccaattttctggccattcaatcattgctaaacggcctgccaaaaacgaaaagacattttattacgactgccatggagcatcagtccattcataattgcgctgcttttttggaacagcagggatatgatgtaacagtcattgaaccgaatgaatacgggcttattaccgaggaaatattactagcccatatccggccggaaacaggccttgtatctattcagcatgcaaattctgaaaccgggatcattcagcccattcaccgcctgtcttcatacctgcacaataagggcattcttcttcattgcgacgctgttcaaacgtttggaaagatcccgatcaatacaaaaaatctgggagtagatgcactctcaatgtccagccataaaatccacggtccaaaaggagtaggggcggtctatatccgtccggatgtcccttggaaacccgtttatcctctgactactcacgaatacggattcagagccggcaccgtaaatgttcccgggatcggtgccttcactgccgctgcagaattgatcgtaagcgaaatggaaaaacagatatcccgcaatgaggcattaagaacttactttctagaccaaatccgtattcggtctctccctgtaacccttgcggcagacacttcgcaagcagaatgtcttccgcatattatagggtgtttttttcactcatttgaaggacaatatgttatgttagaatgtaatcggagtaatatttgcatttcaaccggcagcgcttgttctgcaggttaccacggtccgtctgaaacaatgaaagcattaagaaaaaccgaacaagaagctctgcaatttatccgcatctcttttggcaggcatacaacagctgaacagctggaacagttattacatacgtttacagtgctttgggaacaaaagaaaggagaatttgatattgaccgaagaattaaagctaatgggcgccaacaggcgtgaccagcttcttctgtggctgaaggaatctaaatcaccgctgacaggaggagaactcgcaaaaaaagcgaacgtttcaagacaggttattgtacaggatatatcgctcttgaaagcgaaaaatgtaccgattatcgccacaagccaaggatatgtatacatggatgcagccgctcagcagcaccagcaggcagaaagaatcatagcatgtctgcacggtcctgaacggacagaagaggaactgcagctcatcgtcgacgaaggcgttacagtaaaagacgtaaaaatcgagcatcccgtgtatggagatttaactgcagccatccaagtaggcacccggaaggaagttagccatttcattaaaaaaatcaattctacgaatgctgcctacttatcacagctgaccgacggcgtgcacctgcatacactgacagcacctgatgaacatcgcatcgatcaagcttgccaagccctcgaagaagccggcattttaattaaagactaaaaaaagccctctagagggcttttttataattggtaagactggtatgcacccaggagctttactttgcagccgagcgcttcaagctcctgcatggcccctggaatcaatacatcatcaaacgctttctcaatatcaataataaagaaataatggcctaatccggttttagtcggacgtgactcaatttttgacaagtttaaatttctccaagaaaatgcagacagcactctatgcagcgccccggactgatcatcctgcggcagcatgaccattaaggtcgttttgggcctagaactcaattttgaattcacttcaaaagatatgttttcatcaggagacaggataacaaatcttgtatgattgtccctataatcctgtatatcccgtttcacgatttttaattcgtatgtagaagctgccatatcattggcaatgaccccgatattcagctctggatggtcactgacaaactttgctgccgccccggtagaattggcgtattcatatggaacggaaggaaaatgtcgatggagaaatttatggcattgcgcaatcgcgtgtgaatgcgagtaaattctgtcgagctctttccatgcattctctcttgagggatgaacgagcaagtgctgatgaatcggcaacgtcatttcacccacgattggcaagggctgttcatgtattaaatagtctattgttagattaacagatccttctaaagcattttccaaaggaacaaaagcaaaatcaacttcgcctgcaacggctgcatctatacactccggaatggtgcggtaagcaacatgttcggcgccgttttgaaaacaagaactgactgctagatgtgtaaatgtagctgctggacctaaataaccgactttcatgacgattttctctcccttatgcacctgaacctaatatttcaaccttttctacaaaatcaaacttcctgagcttattcattaatgtatgaatgtcttcttccattgccgacgtactgatagacagtgtcacatttgctctgccttgaagcggaatggtctggtgaatggaaagaacgttgcttccagaatcagctaccgcctgaagaagctgagataacgcacctgacctatcctccaaatgaaagaaaagtgtgataatttgttcttttaccatggtgtagaatggaaaaacagcatccctgtatttataaaacgcacttctgcttaaatcgaccttttgaacggcatctgctactgaatctgctttttttcgatcaagcagctttttgacttctaatgtttttctcattgcatcgggcaatacatcttcacggacaagataaaatgtctcctctttcatttgcatcccccctttaaaatagagagcctggcaccaggctctcttttcagccaacattcattaatcaataaattcaaattcaaattccagaagcctgattatatctccatccttggctccgcgttctctgagtgcttcatcaacacccattccgcgcatctgtcttgcaaaccgtttaaccgattcatcacgtgagaaatcagtcatcttgaataaccgctcaaggctgtctcctgaaagcacaaatacaccgtctggatcgcgtgtaatgttaaatggcacttcttcattttccatcgtgtacatgacacggttttgtgtaagctcttcctcgtcatacagcgggaattccggtgtgttctcaagctgattggcaacctcaaacagaagctcacgcagaccttctcttgtcaccgcactgatcgggaataccggataatcatccgtcagcttttctttaaaggcttcgagattttccgcagcctccggcatgtccattttatttgcaacgataatttgcggacgctcagtgagacgcagattgtactcgctcagctcctggttaatcgtaagataatcctcatacggatcgcggccctctaagcccgacatgtcaatgacgtgaacaataaccctcgtccgttcaatatggcgcaaaaactggtggcccagtccgatgccttggtgtgcgccttcaatcagtcctggcaaatcagccatgacaaagctgcgtccgtcatccgtttcaaccatgccgagattcgggacaagcgttgtaaagtgatagtccgcaattttcggttttgcagatgagacaacagacagcaaagtcgattttcccacactcgggaacccgacaagcccgacatccgcaagcacttttaattcaagaacaatgtagcgttcttttcccggctcgccgttttctgaaagctgaggcgcgggattagccggtgtagcaaagcggctattccctcttccgcctcttccgcctcttgcaatgacagcccgctgtccgtgctctgttaaatcagcgatgacctgttttgtatcatcgtctgtcacaacggtgcccggcggaactttaataaccatatcatcagcatttcgtccgtgctggtttttggacatgccatgctcgccgcgaatcgctttaaagtgttttttgtatctaaaatccatcagggtgcggagaccttcatctacttcaaaaacgacgtctcctcccttacctccgtcaccgccggcagggccgcctttcggcacatatttttcacggcgaaacgcaaccataccgttgccgccgtcgccgccttttacatatactttgacctgatctacaaacataatgtcctccgttctaaaccgttaaaaactccgctagtccaacccaatctcaatcagacattcgtgactcgtgatttcaaaacgcatgatatcaacgtcctcatatccattctgccgaatatcatcaaaagcagatggatcggcaaaggcgccgtgaaaatcaaggtacagaatcagctgtctgtcaggatgatccgtttgaagcgaaaccgttaaatgattttcactctctctgctgactgcttgatcaaacagatgaaacagctttctcatcagtttcgccagcttttgatcataagccgacaaatccttaatttctccgagaacttcatattcaagcgtcatataatgggttttccaattaaacgtaagaaaatcaaacgccaaatgcggtgttttcaggtttgagagctttgattcgtgctttgcgtctataaccatttcttcaatcatttcaaagacgcggtcatacttctgcaagcttaagtttcctttaatcagctgcagcttattcatccaatcatgccgggaatggccaagcagatgaatcagttcgtttgttaatgccgtgtcgcttatattttcttcttgattttttgaaacatccttcattttcgcactcccaatcatttaatttcttatttaggagtctgtataagtgtgtattatgaattataacagagaaggctttgttagaaaaacaattgtttttcccagaaatatcatgttccttttttctggctttggttgatttgcagccaggcagaacattttatgtattactgcttggggaacatatccagtgggtttgagatgtttattctcattcttggcggggtctgctcgcacatactctgcatttcattctaggtgtttactccgcatattgcaaaaaaaactccagtcatcatcgaccggagttttttgaatcattattgagctacaggatatacgctcacttttttgcggtcacggccgaaacgttcgaatttaacagttccgtcgattttcgcaaatagagtgtcatctccgccgcggcccacgttttcacctgggtaaatttttgttccgcgttgacggtaaaggatagaaccgcctgttacgaattgaccgtcagcacgtttagcacctaaacgtttagcctcagagtcacgtccgttctttgtagaacctactccttttttagaagcgaaaaactgaagatctaatctaagcatgtagctcacctcctatattatgtttgtggtcacacgcaagttgtctttgtaatcccgttcgattgtctccagcgaaacaatcatgccttcaatcagcaactgagctttttggcgtgcctctggatcaagagattcagggaattcaaaataaaaataacccccgtcctcccctatatcaagaagcggctcgaagcccgcgagcacaatgaccgcgttaacggctccaaacacaacggctgtcactccggcacaaacaagatcttgtccatgttcagcaaaattcgcatggcccgtcatttcaaaagacaatatgcctttatcatgagacctcctgattgttgcctgaatcatgcttacgcgttgattttttcgatcgtcactttagtgtaaggctgacgatgaccttgttttttatgaacgtttttctttggtttgtatctgaaaacagtgatttttttcgcgcggccttgtttttcaactttagccgttactgttgcgccttcaactgtagggttgccgactttcacgttgtctccgccaacaaacaaaacgtcttcaaaagtaactgtttcacctgcttcagcagcaagtttttcgatgtaaacagtttggccttcttcaactttgatttgtttaccgcctgttttaatgattgcgtacattctctgcacctcctattagactaagactcgccagataccagggggctgtaaaagctcttaacacctgtactgagcggttgtagcaatggtgctacatccataacattaaaaaatataccaaaatacaagccgtttgtcaatcagttttagtagggcagaagcagttcctccatggaagaattcgtccgcttatcggcaaagtaagcgtgcagcacttcattctcgtcaagctggctgagcttttggcctgatttttctataataatcggatgcttacagccacgtttgaactcggccatcacatgatagactttatcctccgcctttactgtcagcggcagaagtttctcaagctccctgttttttccgtaatacctttcgaggagaaatctcacatggatatagtgcctttgccgatattcctcaaacaaggaaacagccagaaagacaaacaaaacccatgcgctgatctgcagaggaatcacgaataaaacccagcacccgagcaacaggcagaagcagagcgacgtttttagattaagccggtgagccttttgaaaaggcagctgtttggaaaacaacaaaaataacagttttcctccatccagcggccagatcggcagtaaattgacaaataagatagaaagattataaaaggtgaagagttcaaaggtatgctgatgaatcactgagacttctgcaagcatccaggcggcaaactgaagccagatgtgctgaagagggccggcaataatgaccgcaaactcttcctttaacggccgattcccgtgttcttccacttcgaccgttcccccaaacggcagcaaaaaaacacgcttgattctccaagaaaaaaatacggccagagcagcatgccccagctcatgaatcaatacaatcaggagcagacataataatgctttcatatggcctgtgagcaagcccagcgccgcgataatccaaagaaaaggatgcacatggatctttaagataaggtcgagccatttattcaaatgtaatcacctgaatcggatcaataaatttatcgccgtctttcatggcaaaataatagacccctttattatgatcatcaagcttaatcgaaccgagctttttgcctttatccacaaaatcatataaagcaacatccacatctttgagctcgccatagatactataggtgttgtcagcatgctgcaccttaaccgtcagtcccgtctggctgtctttgctgacttcaaccacatagccttcttttacactatcaatcttatcgctgcttgtttcgactttaattccttccccattgtcctgaaaatcctgctgtactttcccggatgcaggcgcgatcagatctttgcctacttcaatctgctgttccttatttttgtgttcaggagccaggaaagcaagcggatttccgaatttggtttcgaaccaatggcttgctgaagcaaattgaaattcagtttcaaaggttttggctacggcgggtttaatctgactgacgggtccaatgtttgttttataggctatagctgaaacgagaacaaggcaggccgacagaagacatttcaggataattgaatctgttttcaccaatgggtgttttccgttgaatgttggcatgttatcttcgtagaccggaagtgttccatgcttttcctgatccgttaccatcacccaggacgggggtttctgcttttcagaaactgtctgagtagagaaacgttttgagccggaaagctgctttcttcttttctctaatcgttttctgatttcatctgctctgtgactcattgccatcatcctttgcattcgttgggtttgtacatcatatgtcttgtccatggcaaatattcggtttagtcaggaacaaagcaggcaaaaacaaaaaaacctgacacagcatttgctttgtcagattcttctctttaattctatcacattaagatcttacgccgaaaaatgacttaatcttagccatcattcctttattttgctcttcaagcacctgtaaaggaacagattcacctaagatgcggcgggcaatattgcgatatgcaatagaagcgcgatttttcgggtccatcgcaatcggttcaccatggttggaagctttgatgacttcatcatcatcagccacgattcctagcaaatcgatcgacaaatgctgtacgatttcgtcgatatccatcgtgtcaccgtttttcatcaggtgatttctgattctgttaacaacgagccgcggcggttcaatattttcctcttgctccagcagccctataatacggtcagcatcacgaacagctgagatttcaggcgtagtgaccacaatcgctttatcagctccggaaacggcatttttgtacccttgctcgattccggcaggacagtctatgatgacatagtcaaattcctgtttgagctcttggaccatgtttttaatttgttcaggagcaacagctgtcttatcgctcgtttgagcagcgggcattaaatagagcagatcatcgaaacgtttgtcttttacgagcgcctgatgcattttgcatctgccctctacaacgtctaccagatcgtaaataattctattttcaagacccattacaacatcaaggttgcgcagtcctatatcagtatctactaagcatacgcgcttccctaaaatggctaaggcggtaccgaggttcgcagatgttgttgtcttacctactccgccttttcccgaagttattacgatagcctcacccaattcacattcctccctcaagccttgttagatcaggtcttaaatgagccaaatgttgaaggcgttcaatgaccatatttccgtctgtatctaaataagcacattccatttcgttccctttttgaatgtggtctggggagcgatttaacacatgattgattcttaattgtgtcggaagcatttcagaggcggcgatgaccgcttgattatttccattaaacccggcatgcgcgattcctttcagtgagcccagaacaaaaatgttccctccggccctgactgttccgccgggattcacgtcaccgatcaggagcaagtcgccttttacctgcagcacttggcctgaacggacaatttttgaaacagaaataatttcggcttcctctcttatctgctgtgcttcttttttagtaatgacttcactgtcaatagaatgaacaaacaaatctttctttgacgcaatcaattcggttagctgttcctcttgctccttatataaaaagcgatttcccagcttaacatgaacgctgattttctggccttttccatcggtatattgttcaattgacagcatattctgaagaccatcgagaagctcatcaaaagaacacgcatcatccagatgcaatgttagtccattctttgttccttttattgttacatattgctgctttttggtcttcacaatattcacctcaacaacatactcatttcgtcaaaaaaagataaaatcctttttactcatctctcaattctttctttagactcataaaaaacaatctaaatggcagaacaagaataagagctgctgcaatatttaataaaattgtcggtataaaccggtcaagcacaaatccgttaaacgtcataatatctttatgaatcaaagactgaatgccgaatacgtaaaattcgagcagacagacagccagaactgctatcaatatcactacaaatgcgtttgtatgtaacactttaaacgcttttgaagccaaatagcatagccctgcaaaaccaaacatgtaaacgcctaatagacttgtatagttcatgtcatatagaaaaccaaaaataaatccgtaaatcatcgcgtgtttttggttgataaaagccgacatgaatatcaatacaagcatcaaaaaacgcggggcgagcacttggtcatctgtaacgaaaggaaaatgcaccaaatctgtaaaaatgctttccgcagaaaaaacaagcatcataacgaaagggagaaggaaacgtttcacgatccttcctcctctgtatcgacagtcggcacgtcacggttaacaacgatcacattatttaaatctgtaaggtcagccgcaggttttacataagcaacctttgtcagtccataggaatctgactcgatatcagtcacttcaccgattgtcagcccttctgggaaaacaccgcctgtccctgatgtttcaataagatcgccttttttcacgtcttgtttatccttacgctcaataattgtcatcttaagacgttttttctctttgtcatatccttcgatcaagccgtagcctttgctgcctttttttccggaaatttttgtcgcgactctgttattgcggtcagtatcgcttaaaagctgaacagcagacgtaaaattgttaagtccggagcttttgatcttgccgattaatgcgcctttttcgtttgtaacggccatatctttcgctacgttttgctgagtccccttgttaatggtgacctgtttggcccaattatcagggcttctggcgatgaccgttgctaaaatcggcttgtaatctttaatcgatttgacatggccaagctcgtcacgcaaggatttgttttcttcttcaagctcttgaagcttggcttcatattgtgtctgtccgtcaagtttttctcttagacgctcgttttctttgtatgtgttttttaaatcattgatgttctcaaatattcctgcaaaaaattcggcaggcgtatgaaaaatattttgaaatactcccgtcgtatcgccgatcactttctcaggccaggtggtattgcggccgcccttcagcgaaaatccaatcatagccaccaatatgataatacacagaagtaatagcattaaccgcttattcggcatcgtgttacacctcttctattgaactcccgattatctagttttccctttgaaaagatggatgtgctccagtgctttccctgttccgatcgctacacaatcaagcgggtcttcggcgataaggaccggcatttttgtttcttcgctgatgactttgtctaaattgcgcaaaagcgctccgccgccggttaacactatacctctgtccatgatatctgctgcaagctcaggcggtgttttttcgagtgtgctcttcactgcttcgacaattgtagatacagtgtcgcgtagagcattagaaatctcttttcctgtaatttcaattgttttcggcagacctgtgagcaaatcgcgtccgcggatttccatgttgtcggattcttcaggagcttctgcagatccgatttccattttaatcgcttcagccgtacggtcaccgatcatcaggttgtacgtttttctgatgtagttgataattgcgtcgtccatctcatcaccggctacacggattgactgagacgttacgatgcctccgagggaaataatcgcaacttctgtcgtaccgcccccgatatcaacaaccatgcttccagtcggttcccaaactggcagattggctccgattgctgcggcaaaaggctcttcaatcggatacgcgtcacgcgctcccgcctgtcttgtcgcatcgataacagcgcgttcttcaacagctgtaatgcctgatgggacacataccattacatatggttttctggcaaacatgcctttattttttatggcttgattgatgtaatatttcatcatcgtcgccgttgtttcataatcagcgataacgccgtctttcatcgggcgaagagccaccacgttgcccggtgtccgtccaatcatatttttcgcatcatttccgacagcgacaatcgatttcgtatccgtctgcaaagcgacaactgacggctctctcacaacaattccttttccttttacaaaaacaagcgtattcgcagttccaagatctataccaaggtctctagcaccaattccaaacatatgtatgtatcttcctttcttaaagcaaaaataccctaaagggaaaaactcataaactctattatagcttaattcgacgaaaaaaaaagtgttacaaatatcctttttcctttaaactcacaaattttttatccccgatcaccaaatggtcaagcagctcgatgccaatcaggtttccgcattcaaacagccgtcttgtcacttcaatatcctccctgctcggcgtcggatctccagaaggatgattatgaacacagataaaggaagcggcagatcgtttaaacgcttctttaaacacctctcgcgggtggacaatagatgaattcaggcttccgataaatacggtgcgtttatggatgacttgattttttgtatttaagtataaacagacaaaatgctcctgggttaaaaagcgcatatcctccatgacgagattagcgccgtcttccggggagcgaataacgaaatgttcttcgttggctaatttgtgaatccggcttccaagctcaactgcagccagtatttgaatcgcttttaccataccgattcccgggatgcttgacagctcttcaaccgatgcttccttgagcagacgcagcccgtcaaatgagcgcagcagccggtttgacaggtccaaaacagattcgtgtttagtccctgtccgcaataatatagccaaaagttcatgattcgctaagttctcggctccgactttcaggagccgttcccttggcttttctttcattgggaaatctttgagttttaatggcagatcgcgtatgaccaagcactccttttctttcccttcccgtttatagaaccgtcatgcccttatatcaaaatggcgaagagctctcattgtttttgatataggaaggcccatgactgaataataatctccgtctattttctttacaaaaagcgcgcctcttccttggatgccgtatgcacctgctttatccatcggctcttttgtttcaatatatgtccaaatctcttcttcactgagggaccaaaacgcaacttctgtcttatcataaaaagtctcgctgtgattttcagcttgaatgctgaccgcggttattactgagtgacttcggcctgaaagcctccgcagcatagaagcagcttcttcttgatcctgcggtttgccaagacattcgccgtcaaggcataccattgtatcagcaccgataacgattgcatgcgggtggagatcagctacagccttagctttttgttttgccaaccattggacgttttcttctggtgaaaagtttcgatttaatttttcttctacttcactgacaataatggagtagggcagctgtagaagatcgaggagttctttcctgcgcggagattgtgatgccagtattagcggttttgtcatgttcgtcatcctttcagggtttgcttaagaaaaaaagatactcgtttatcctaccaaatcacgaggcttgtcacaatttcagaaaaataactttttcatgacaaaataaaaaaagcctgtcactaaaggacgaaggctcagggcactatctcttattttacgacggctaacagctcctgctgagccttccacccggcttcagcacttggatcctctaattcctttaaagcctgcaaaatcgcttttttctctcctgtttctgacgcttttgtttcaccaagcgacttttctattttctctacactcgcttttgtaatgtcttcgccgagaatcgcctttgctgcaagctccgctgtttccttaaaagaatctgtcatatctgactctattgataaggaaagctccttgcctccccaggcttcaaaatcactgtcgattaaaacctgtcctaactgctgtgagacatccttatcactggctaagcccgcgatgacatacgtatacccgtcatcctttgacagtgacacggcggaatatcctttttcggtcaattgttctgttaacgtttcggcgcccttttcatttgaaaattttccggcttgcacagcgtatgttttgtatgtaccttcagtttgtgcttgtttttctgcgtctgaggtttgtttatcagcagaagtatcccctgcttttgccgtttggctgcctagagaatcctctaaagaggccggtgctgacgcttctttattccccgatatgtttaacgcgaataaccctaatccagtgccaatgacagccgcgaaggcaatcgtcgcagccactctttttactggtttggcagtcccggtctttccttttgcataagactttgtttttttcttttgataaggaggaacaactttagggtcctctttaaacaccttgtccccctcggaatcccaattgaattcatcttcatcagggtgttcctgggatgccgcaacctcttgttctgcctgtcttttttcctcccaatttgaaaatgtcatgcttctatctgcctctgtatcaggtgtctcttgttcgtaaaccgtctcttcttttccattaatcgtcaccttgagggctttttctgcggctttactgttttttttattctttctttttttcaattccgcttcctcccttcatttgcttgaccgttcttgtcggcttttcatgctacacactttagcacaggcaaagaaaaaaagaacaagacttttgtcgccttgtccaaaaaacgttcgtcaaatttttcagcagtcagcccaatgccattttgatataaaaagaaatgatagagtcaccgtataaataggctaaaatgctccctgcggccatagcgggggcgaagggaagcggctgccttttagcgagtctaccagtcagaacagctgccgctccatataatgcacctatcaaaactgaaaagaaaaaggcagctgccagcattttcacaccaagcacaaagccaatcaccgcaaataatttaatatctcctccccctactcccccatgggtgattgcggcaattacagccagaaatagaaatccggctgccgcacctagcaggcctgcataccaggaatcaagcggagaaatcaatctcgcggccgccaaaaagggaagaaagaaaatcaatattcgatttggaatcagcataaaatgaatatctgtcactgcaacaataatgagaagagagataaacaccacagcgggaaacagttccagcgatgtgccaaagcgtattcctgcggcagcaaataaacacgctgtcacaagctctgctgcgggatacataaaagaaatcctatgcccgcagcttttacatttacctttttgaaataggaatgacaggatgggaattaattctgcaggagttaatgtccgccggcaaaacgggcatgatgaacggggcgcaataatagatagatgtaaggggatacggcacccggccgtatagtaaaaagaaccaaggatcagcccaaagataaaaagaatggatagcatagacaacacacctttactcattgagttctggtatggattgtagcaaaatggacatcctgagctccaattgggaatattcaattttacacataaaaaaacggcagaatcttttttttgattctgccgagccggatgcttttatttcaacctttttcgaatgtcagaaataaagtaaagagatccggtaatcagcacaatttcatttgagccctttttgctttctatgaatttgatcacatcgtctggatcttcactccagcttttattgctgatttcacttgcatcatagagatcttttgcaagagaagcacgcgggaaatcaaaagaagcaaaatgcatcgcatgagcaatggtttccagtcttttaatcatgttctgatacggtttgtcctttaacgcgctaaacaccacagaaatgcgtgaattggcgaaacgctgcttcatcgtttccgccagcttttcaacaccttcttcgttatgcgcaccgtctaaatataccggaggatgctcctgaacaagctctaaccgtcccggccaagcagccttcacaagcccgctccttaacgcttcgtcactgatatgggcgatattctccttattgagccactccgcagccaaaatggacaaagcagcattttgtctttgatgggtgccaatcagagatgtccgaatatcttcatagcatttctcttccgttttgaatgaaaactgttctcctgcaggcagagcctcttcattgaaaataacacatgcatcatgcaatgactggaacggcgcagcatgccgttcggcttcatggcggatgacctgtaaagcttccggctgggtaactgctgtaacgattggaataccttctttaataataccggccttttctcctgcaatttcttcaatggtgtttcccaaaatattcatatgatcgtgtccaatgcttgtaatcacagttaagagcggttcaaccacattagtagaatcgaatctaccgcccaaacctgtttcaaaaataacaaaatcgaccttatgaaattctgcaaaatataaaaatgcacaggccgtcataatttcaaattctgtcggctgtccgtattccgtttgatcaagggcttcaacgtgcggtttcatttgattgacgagtgctgtccattcctcatctgaaatcggtatcccgtttacgctgatccgttcattaaacgtaataatataaggcgatgtaaatgttccaaccgtatatccggcttcctgcagcatagaacggataaaagcgacagttgatcctttaccgtttgttcctgcgacgtggaacgctcggatttttttttcaggatgtcctaaccgcgccatcagctgtttcattcggccaagtccgggcttcaccccgaatttcagcctcccgtgaatccagctgcgcgcatcttgatatgcagtaaacaatgataatcccctcttttataagacaaggcggtttctctagaaaccgccccggcttttcattaacccttcagctcagccattcgtttttgaacagcgtcacgcttcgccacataatctttttctttttcacgttcttcatcaattacgtgtgcaggcgcttttttcataaatccttcatttccaagtttcttttggacacgctcaacttcttttgtcagtttatcaaattctttttgcagacgggcaatttcttcatcaatattgattaagccttcaagcggaagaataacctctgctcctgagacaacggccgtcatcgccttatcaacagcctcaatatcggtgccgattttaagcacactcggattcgtaaagcgttcaacatatgaacggttcgcttcgaggcgggctgctatttcgtctgtgcttgttttaatgtacagttcaacctgcttgctcattggcgtattgacttcactgcggatattgcgcacagaacggatcagctcaacaagaagcttcatgtcagctgccgcttcagtatcggtatgctccggcactactacaggccattgacttactgtaatcgattccccttggtgaggaaggtgctgccaaatttcctccgttaagaatggcataaacggatggagcagacgcatcgtttgatcaagtacgtaagcaaggatggaacgggtagttttcttagccgcttcgtcttctccataaagcggaagcttcgccatttcaatataccaatcacagaaatcatcccaaataaagttatataaatggcgtcctacttcaccaaattcatatcgatcagcaagctgggtcacgtgctcgatcgtttcatttaatcgcgttaaaatccacttgtcagcgactgacttttcgcctgagagatcaagctcatcgtacgtcataccatccatattcattaatgcaaaacgggaagcgttccaaattttattggcaaaattccaggtcgattccactttttcatagctgaagcgcagatcctggccaggagagcttccagtcgcaaggaaataacgcagagaatcggctccgtacttgtcaatcacatccatcgggtcgacaccgttgccaagagatttactcattttccggccttgctcgtcacggattaagccgtggattaaaacatctttgaacgggcgctcgcctgtaaattcaatgccttggaaaatcatgcgtgatacccagaagaaaatgatatcgtaccctgtcacgagaacatctgtcggatagtagcgtttaaagtcttcagcagttacatcaggccagcccattgtggagaaaggccatagcgcagaactgaaccatgtatccagtacgtctgtatcctgttcccaattttcgctgtcttccggcgcttcaagcccgacatatagctcgcctgtttctttatgataccaggcaggaatacgatggccccaccacaattgacgggagatacaccagtcgcggatgttttccatccagtgtaaatacgttttttcgaaacggtcaggcacaaagttgaccttttcttctttcttttgcagctcaatcgctgcatcagcaagcggctgcatgcgcacaaaccattgtgtagaaagataaggctccacaacagccccgcttcgttcactatggccgacagagtgcatatgatcctcgatcttgaagagaactcccgcctcctgtaaatctttcacgagctttttgcggcattcaaaacgatccataccttgatattggagcgcattttcattcatcgtgccatcttcattcatgacaaggatgcgttctaaattgtgtcggttgccaagctcgaagtcgttcggatcatgagcaggcgtaattttcacggcaccagacccaaattccatatcaacatagtcatcaccgacaatcggaatttcacgatttacaatcggcaggatcaccgtttttccgataaggtgtttatagcgctcgtcttcagggtgaacggcaacagctgtatcaccgagcattgtttcaggacgtgtcgtcgcaatttcaattgagcctgaaccgtcagcaagcggatagctcatatgatagaatgcgccttgaacatccttgtaaatcacctcaatgtcggatagggctgtttttgtcgctgggtcccagttaataatatattcgcctctgtagatcaggcctttttcataaagcttaacgaatacttctcttaccgctttgctcaagccttcatccagcgtaaaacgttcacgggaataatctaggccaagacctaatttcgcccactggctgcgaataaagtcagcatattcttccttccacttccacgtttcttcgaggaatttttcacggcctaaatcgtagcgggatttgccttcttcacgaagtttcgcctctactttagcctgtgtcgcgatgccggcgtggtccatgccaggaagccacagcacatcatagccctgcatacgtttcattcttgttacaatgtcttgcagcgttgtgtcccatgcgtggccaaggtgaagtcttcctgttacgtttggcggcgggatgacgacagagtatggctcttttgtctggtcactgcccgcttcaaaaaatttgccttttagccaaaaatcatatcggtctttttcaaccgctgccggatcatatttcgtcggcattgtttgttcattcgtttccatcataaccctccagcatgtttaaaaatggctgagaacgaaaaaagagctcttcatccctgtaaaaggacgaaaagctctttcgcggtaccaccttttttcatgaactctatcagttcatgcacttataacggataacgggtgtttcccgaatttctctactcttctttcaagaaattatgctcccgggcgaccttccaatcagacaacataagaagcctttcagcaaacggcttctctctctgcatgcgccttttttgtactcttcccgttctaagcaggtgtatttatcagctcattgtacattatttatgttctttattatagtaaaagtgtttttgattcgtcaatcatcttttccaaaaacaccgctttctatacagatgggcaggcacctattgcccaagtttacatatgatgcttgtaaatgcgtagaggaggatgcaccgtgaagaaacgtttcagctcttattcgctgccgccatgggtaaggcaaattcggcttgtatccgcacaagtgattattcccattacgatttttcaaggaatcagaaccattttctttccgacaacctttgatgttttgctgctcgcaatcctaatctttttagcttgcgcccttcatttagaatggatataaacaaacaagtccgcgccattaagacgtggactcgttttcagcctgaaattttttctcttgttcaatctgatgaattttcatcacaaacggctctatatttttcatttgccaataagcctttaataattgtgtacattcctctttttcatgctgtcgtttcccagtttgataaccgttcagcaccttgtacatggctgccggatatgccatatagctgagaaaaaggctgacttccgcttcacgcaaagggaatgatttcgtatatccataaaaccattcgacgcattccggacaagctttcggaaagcctctgaacatttttgtataaaagccgagcaggtcgttttgcggaggaccgacagatgctctttcgaagtttgtaaaatatccggtcccagcatcattatacagaaaatggtgtatagacaggctgccatggttcattacaacccttgaaacgtccttttcctttgcagactcataccagtcctccagccgttccagcgcaaagttcaccgcggaaatggtttctgaaaaataggttatggcctggagttcaaaaggagaaaggtaccattccttctccgctctatccacaaactgctcatagaaaattttatcttgttcccacttttttttcgtttgcccgtaataacgttcaatctcatcacgtctaacctttagttcctgcgcggttctctcgtgaagacgggctgtttctctaaataaataagcatgtttctgatcccgttcttcctcttggtcaaattggagccaaggcattaaatagtaggtatctccgtattgtatgcctgctgagaaaaactcaccgctatttgttctgtaaacgggaacgaatgaacgaaagcctttttcctcaatcgccaccatatgatctgtaaaatgcttgccgcgaccttctttcaattttttcagggcaaatatgccgtagtctgtatacactttccaaacaagaggactgacaggctcaataaattgagcagtcagtccgtattcctgaagaaccgattgggtatcttccatttcattcaccacattttccgatcacttacggtttacgcatggctatttttatattgaggaatatagagaatctgtcctgcttttaattcatcatccaatgctaaagaattcatcctgatcagctgctgggatgtaatttcataccgttcgcataaacgctcgatcgtatcttcctgctgcacaatacaaattttcattctcgaaaactcatccgcttcttttgtaaagagttttgttaaataaagagaattatcactttcctttgtttgaggttccttcgtttcagcagcaggagcaaccctaggaacagcatccgtttccttcctttcagtctcagaagattcaggcagctggaaggattgaaaaggtgtttcttccttaggctcttcaggtgatggtgtttttctcacttcaatttcgaagctctcttcctcttgttcttcctcctccagcagcttaggcgctgaataaaaagaatcctcctcttcttgttcagacaggaaggtacggtatgccggttcaggcaattcttcttgagatgcctcctccgagcttgttttttgattgaaatggaaatgtaaatcggctttgtcattctccacatatgcagctgaagctgtttctctgctatcttctatggagagagcagcctctgatacactctccaaagcttcatccgcttccgcctcttcttggcaaagcgcaggatcagcctgatccgattgagctgcttcttcattttgagcctcttggcgcagcgcatattcatgattaggagacactgttgtttcctctttttcctttgcaatcacagtctctgaatgaagctcagcttccaaagcaggcgattcttctgctccagcgtgttcacgaggctcagtctctgctggagagtctgcttcttcacgaacatccgctattgcagctgccggctctgccgtttctttttttgctttaacgatctcttgaatctctatttctgaaggatcaggttctggctcagattcttctgtttccgattcagcacgaacctccttttccgcagcaagctcttctgactcttcttcctctttcacatcttctctggcctctggatctgaagcaaccgattcaggcggctcagattctgctttttctgtctccagttcttcacggagccccgctttcgagataaaaagttctggcggttcggctggcggttcatgctgaagaactgcttcctctgccgatgatgcacccggttcttctactacactatgtgccggcggctctgaaagctcttcctccctgaatgccgcaggagcttcatataaaggtatctccggctctttgtcttgcgtatcgtccaaaagcccttcgatcgctaaatcagcttgaattgttaaaatgcgcgaatccgtcaattgatagtcaaatgcgtcaataaagacgaagacatcctgtaaatggctcactttatttttcggaatggtaatatccacaggaaaacagtgagtcagttccgcacttccatcctctctctttctgacttgttcaacaaaccgcttatctgtataaatctcttcggtatgtttgttttgatctatgttgtactcacctgtaagttcaagcgatcctatgattgatacataatcatttacttcctgaaccctaatatcaggatctaatgaaatagaaagcagttcagaaacttcctgtcctttttggaaacagatcgattcttctacagaaaattgcaatcgatgattttgtggcaagttcatatcctcctttcatctaatccttaaaattagatgtcactaaaggtgtatgtatgaactggagaaaatatgagtgggagagcacgaaaaaaccggcacaaggagtccttgataccggttttcactcttatctgcggctgatctcagcaaatactttctcagctgcctggattgtgttttcaatatcttcatcagtatgggccgttgagaggaaaagaccttcgaattgtgatggcggaaggaataccccttcatttgccatccctttataatagcttgcgaacagcttcaaatcagatgatttcgctgtttcataattgatgactggttcgtttgtaaagaagaaaccgatcatcgaacctgcacggttaaaggtatgcggaatgccatgagcctcggcggcttttgaaattccttcttccagcctgtcgccttttttgatgaaattcttgtaggaatcaggtgtcagctgtttcaatgtctctaagccagccgtcatcgcaagcgggttgcctgacaatgtaccagcttgatagatcgggccgcttggagcgatctgctccatgatttctgcctttccgccataagcgccgacaggaagtccgcccccgattacttttcctaaacaagtcagatcaggcgttacgccgaagtagccttgagcgcagttataatcgacccggaagccagtcatcacttcatcaaaaatcagcagggagccgtactgctcagtgatatcacgcagaccctgcaggaaaccttcttgcggcggaacaacacccatatttccggcaactggctctacaatgactcccgcaatgtcttcaccgaattgctggaaagcaagctttacactgtctaaatcattgtacggaacggtgatggtgtttttcgcaatgccttcaggcacccccgggctgtcaggcagaccgagagtggcaacacctgaaccagctttaatcaagagagaatcgccgtgtccgtggtagcagccctcaaattttaaaatcttgttgcggcccgtatagccccttgccaaacggagggcactcattgtagcctctgttccggagcttaccattcggacgatttctacagatggcacacgatcaatgacgagcttagcaagttcattttctacttcagtcggagcaccgaagcttgtcccgtattcagccactgttttgaggctttctacgacgcggtcatttgtatgccctaaaattaaaggcccccatgacaagacgtagtcaatatattcattcccgtcaatatcaaagattttcgagccttttccgcgctccataaaaatcgggtccatgtctaccgatttaaatgcgcgaacgggactgttcacaccgcccggcatgagtttttgcgcttctttaaaagccgtttttgatttttcatagcttctcatctgcctcaactcctgtcaactgaataaaattactccgcaagccatttcgctgcgtctttcgcatgatacgtaataatcaggtcggcacccgcgcgcttcatgcttgtcaaaatttccaacacaatttctttttctttgatccagccgttctgcgctgcagccttcaccattgaatactctccgcttacattataagcgacgagcggcaaagtaaactcattttttacgtcacgcatgatatccatataagaaagcgaaggtttgacaatcaaaaagtccgcgccttcctcgacatctgattgtgcttcgcggagtgcctccatacggttggcagggtccatctgatatgttttgcggtctccgaattgcggtgtgctgtttgctgcatcacggaacggaccgtaaaactcacttgaatatttaacagcgtaagacatgatgggaatattgacgaatccttctttatcaagtgcttctctgatcactgtaacaaatccgtccatcatgtttgatggcgcaatgatatccgcacctgctttcgcttggctgacagctgtctgcgccaaaagttccagcgattcatcattgaggatgaccccgtctttgacaagtccgcaatggccgtggtctgtatattcgcacaggcacgtgtcagcgacaacaaccatttcagggaagtgttctttaatttctgtgatggctttttggacaattccgtgatcatggtacgcttgtgttccgcaatcatctttttcttccgggatgccgaacacgataacagattgaatgcccagtttgaccagctccgctacttcatccttcaataaatctaatgatacatggtaaacatcaggcattgacggaacagcttttttgccttccagcccttcaacgacaaaaatcggataaataaaatctgatggatgcaaacgtgtttcctttaccatttctctcattgcttttgatgtccgcaggcggcgatgtctattaaatgattgactcatattctctcttcctctcttgacatgctgcacattaattcaagcatgccatctattgtaaatgtatcaggcgtatgcgatgtgatgccgtacgtcagaagggcatcatttgttaaaggcccaatgctgatacaggccgtcccattcgccttccacttttttaattcttctcccaagacatgcataaacgtatgtacggttgatgaactcgtaaatgttacatagtcaaaggaatattgacccgcagcgtctttcagtgcctcaatgccttcttcatccggaatcgtttcgtagagaacccattcctttacttcaaaaccgagcgggacaagctcttgttttatcacatcacgtgacaaattccctttcatcacggtaatgggctcccccggttcagcatgctgcttaagagcgtcagccaattgttcagcaatatactcctgtggcatcacatcaaccgatacgttatgcgtttttaaacggcgggcggttttttcaccgacggctgcaatttttttatgcgcagggagaataagctgattttccttcagataagaaaaaaagaagtctgccccgttcacacttgtaaaaacaagccagcctggcgcggcaagatcctctcttacctgttccgcaacatcattcggcaaagcgcggcgaaacgtaatcaaagaggttaaaaccgctttaccgccaagcgcctccactttttgctgaaatgatgttgcctgtgccttattccgggtaacaagcactgtttttcctttcaacggaaaatcattttccatcctcatcaagctcccgttttacacgatcaattaaatcttttgctcctttgtcagccataagagcggcacagcgctttcctacttcctccggatcgtttccggtgacggtttctttaaaaatgattttgccgtcaggtgaagcgacaagacctgtcatttcaatttcatcctgtccatttaacacggagtagcctgcgatcggaacctggcagccgccctccatcgcgtttaaaaaagcacgttccgctaagacagtccgttttgtatattcatctgtaaactgagaaaacaacgccaacagctcttcatccgattctcggcactcaatcgccagtgctccctgccccacagcaggcaaacagcgctcaggctcaaggaattcggttacgacatcttgcttccaacccattctagaaaggccggcagccgctaaaataattgcgtcataatcctctgtttccagcttttgaagtcttgtatctatattacctctaatccatttaattgtaaggtcagggcgctcaatcaaaagctgcgcgcttcttcttaaactgcttgtgccaacgacagcaccttccttcatttctgaaagctttacgcgattctttgaaataagggcatcacgcgggtcctcccgttcaggaatacagccgatcacaagaccttcaggcaaaacagcaggcatgtccttcatgctgtgcactgccatatcaatctcttcgtttaaaagcgcctgttcaatttctttgacaaacagcccttttccacccacttttgagagtgtaacatctacaatccggtcgccctttgtcacgatctctttaatttcaaaagcaaacgaaggattgatttccttcagtttttgaataacccattttgtttgagtcatagcgagtttgctccgtctggaacctactttaatcgttctcatcatttctttcctcccgaatctgcttgggacatcgtttaactgaaccaatggaattgcgacaggcttccaagcaggaaataattgatcatcagcaccagaaaacaagccgtattccacagtgctgcgacctttccttgcagctctttaatcagcctgatataaagataatagctgtacagcagcaggacgacaaacgaaccaagcactttggcgtcaaaccaatacagcgtttctagtgagacatacgcccaaatgacgccgagaatcaaactcagcagcagcatcggaaccccaatgacatttaaaacatacgccatataatcaagcttagataaatcttctattctcaacagccattttccccactttttctttttcagcagatgatattgaaacatatatagcacagaaaaaacgaaagaaagggaaaaagcgccgtatgaaagaatcgccattgtaatatgaatcaccaaaagctcggatacaagctgcccggaaaaagcagctgactgctgctctgtcggtgaaaatgtgtgaatggcgatcatagaaaatcctataacatttgtaaaaaacacgataaagtcaacacgtaaaagctttgtcagtacaagtgacagcgtgacaagcacccaggcataaaaataaagcgcctccgtcacatttaataccggaaaccgccccgtcacccacataaaataggccaaatacacggtttgcagagtccagacaatagaaagcaaccagaaggccatttttccagccttccggttgtgttgaagaaaatctataaaataaaagagtacacttaacgcgtaaatgacgattgtcccctcattaagtcttgccattgcagtatcaatcattcagctttcactcacttacaagtgggctaaagcccgcttttgattcagccttcttaaaagagtggaccttctggctgctttccacggttttcatcatttgacggcccgcagcttcttcaatatcaaaaatctgcataaacaacgcgagcttttcttcagaatcagcatctgccgcaagctctttcacctttaaaatcggatcacgaagcatttggttaataatacttttggtgtgtttgttcaacagttttttctctcttgtgcttaagtgaggcagcttacgctcaatgctgtccatcgtttctgactggatagcaagcgccttttcgcgcaatgcagaaataaccggcacaacaccaagtgtattcatccattgtttaaattccacaatggtttcttcaattaacagttcaactttttcagctgtttctctccgctctttcatgttcgcttctacaatgccttccagatcgtcgatatcataaagaaaaacaccttcaagatcattcagcgccggatcaagatctctaggcacggcaatgtcgaccataaacagcggacgtcccttgcgaagcttattcgcgttttccatcatctctttggacacgacaaattcacttgcaccggttgaactgattaaaatatcagcctccgcaagcgcgctttcaagctgattcaagcttctcgcttcacctgagaaacggtctgcaagctccttcgctttcaagtatgttcggttaatgacagtgaccttgccgattccctgtccgtgcaggttttccgcagcaagctcgcccatttttcccgcaccgagaatcaatatgtgcttgcttgaaagatttccgaagatttttttagcaagttcaactgcagcatagcttactgacaccgcatttgagccaatgtctgtttcggcgtgagtccgtttgcccactgtaaccgcctgcttaaacagctcattaaaaatagtcccgatcgttttttcttgctgagctgttttaaagctgtcgcgtacctgtccgagaatctgcgtttcgccaatcaccatagaatcaagtccgcaggctacacggaataaatgctcaacagcggcatcgctctcataaaacgttaagaacggtgacagctcttctttgcttaattgaaaccaatcagctaaaaacttttttatataataacggccggtatggagctggtcgactaccgcataaatttcagtgcggttgcaggttgagacaatgatgttttcaagaatgcttttctcttctttcagctgcaccattgcttctgccagctcattcggctgaaaacttactttttcacgtatctcaataggggcggatttataatctactcccacaacaagtatatgcatcgctctaattacacccccaacgcccaatcttaatttataatcattctaacatagaactcattatttataataattataacatagtttctttcacaaaatgtgaacagattttaaaattcttatgctatattagaaaaagcttcagggaaaagaagcattcctattgacaataccaaaaacagcagaaatttactacacatcagctctaaaaaacaagaaggtgatatgcatgaaacaaaaatcaattttattcccttgcctgctgcttgccgcttctgtatatgcatggcttgaaagcggccaagctgaactgttttcgggacaggatcaatggcctgttctcctcatgctgttaggagcagcctttgtatatcaaggaaaaaaagaagccgttgcaccccatttctttatcggtttgcttctcttcgggatcggtttacacttttttgccaagccgaaatgggtatggtggccggatgattttgaaatgcttctctttatgatcggcttctcactactcgtttcaaccgttcaaaaaaaagaatatgtatatgaagctgtgtcgatgatttgtttttccctgtttttgtactttttcaaacaaattatggcatggcttgagtctgcgcatattccaacagcgcttctgaaggagtattggccgtttgtctttattggaatcagtttattgttattattgataaaacgaaaaaaatctatacgataaataaaaccggtagaggatcctctaccggtttatcatttttttgatcgctccccaagcttcgtcttttccctttttcgtttctgaggaaaagagaatcagctcgtcttccggatcaatatttaatgtttgtcggacaaccttcgcgtgtttgtcccatttgcctttcgggatcttatccgcctttgtagcgataacaataacaggaatgccgtaatactttaagaattcatacatctgtacatcatcattagatggcgcatgccgcaaatcaacgatctgcaccacagcttttaattcctcgcgtgtcgtgatataggtttcaatcattctcccccatgcttcacgctcagactttgacactttggcaaaaccgtagcccggcacatccacaaaatgcaactcatcattgataatgtagaaattaagtgtttgtgtttttcccggctttgatgacgttctcgcaagatttttgcgattgattaatgaattgataaaagacgattttcctacgttcgatcttccggccaatgcgatttccggaagccccccttcagggtactgttccggttttactgcactgatcacgatttctgactttgtgactttcatttcttctctcctactaaggcatgttccaaaacctcgtctaagtgggacgccaatataaatgtcagcccctccctgacgctttccggaatatcctctatatctttttcattatctttaggcgcaataatggtcgttaatcccgctctatgtgcgccaagcgctttttcctttaagccgccgatcggcagcacgcgcccgcgaagcgtgatttccccagtcatgccgacttcacgcgaaaccgcccgtcccgttaaagcagaaacaagcgctgttgccatcgtaataccggctgacggaccatcttttggcaccgcaccctctggtacatgtatatgaatatcatacttctcatgaaagtcaggttcaatgccaagttcttctgttttggatcgcacatagctgaatgcagcctgagcagactctctcataacatctccgagctttcctgtcaggattaatttccctttccccggagaaagcgatacttcaatcgacagcgtatctccgccaacggttgtataagcaagccctgtcactacaccaacctgatcctctgtctcagcttgtccatatctgaaaatacgttttccgataaagtcttgaaggttcttctcagtaaccgtaatccgttttcgctcttcagcaacaatggcttttgcagctttacggcaaatcgcggcaagctggcgttcaaggcttctcacaccagcttctctcgtatagtagcggataatatcaagaatcgcctgatcacgcagctgcaggttgcttttcttcagcccgtgttctttgatttgctttggaagcaagtgatcctttacgatttcaagtttttctatttctgtgtagcctgcgatattaataatttccattctgtctctgagcgggcccgggattgtggccaaattgttcgccgttgcgataaacagcactttggataaatcaaaggtttcttcaatatagtgatcactgaagctgctgttttgctctggatcaagcacttcaagcatagcggatgatgggtctcctctaaaatcagatgacattttgtcaatttcgtctaataagaagaccggattcagcttgcccgcttttttcatcccttgaataatacgtccaggcattgctccgacataggtccgtctgtgtccgcgtatctctgattcatcccgtactcctccgagtgagattctgacgaatttgcgtcccaagctttttgcaattgatttggctaaagacgtttttccgacacctggaggtcctgccaaacagagaatcgggcctttcagggatttggtcagcttctggacagccaaatattctaaaatacgttcttttactttttcaagcccgtggtgctcttcgtccaagagacgtcctgcttctttcaaatcaagcttatcatctgtttcatccgtccacggaagagcaaccagccagtcgatatagttgcggatcacagagctttccgcagaacttgacggaattttttcatatctgttcaattctttaagcgctgtttctttcacatgatcaggcatgcctgcttcttcgattttttccgtcagcgtctgaacttcgccagttttgccttctttatcgccaagctctttttggatcgccttcatttgttcacgcaagtagtattccttctgcgtacgctccatcgaacgtttgacgcgctgaccgatttttttctcaatctccagcacttctttttcattattaataaaatcaatgaccttgttcagcctgtctttgacatcagccgtttctaaaatatcctgcttatcctttagtttaaggggcagatgagaagcaacgatgtctgccattctccccggctcttcgatatcagtaaccgcagcgtacgtttcggccgagatttttttagaaatttttatgtactgatcaaagtggtctagcaaagtccgcatcaatgcttcgtcttctgtatcttttgaatcatcttcatgaataagttgaatgtcaaccgacgtgtaatcctcgtgttcattgtatttgacgatatgggcgcgcttgaggccctccaccaacacacgaatcgtaccgttcggaagcttcagcatttgcttaatttttgtataggtgccgacagtgaaaatctcgtcttcaccaggttcgtctatcgaaatatcctgctgagtggctaaaaatatcatatgatcatgcatcattgcctgttcaagagcctgaaccgacttgtcacgtcctacatctaaatgcaaaaccatcgtcgggtacactaataaacctcttaaagggaggagcgggatgctgcgttttaattcttctgccatgtgactgacacctccgtgactttagtatgaaccattataatacaactttttcatccttgtacaataaacggcatggttccattttctataaaacagtctcctcgtagtataccctttctttctgatatgaaaaaggaaaagatgtccttcatgaaaaaaaccctattatcaaaatagggtttaaacggattctttattgatttcgatatgaaacggtttttgttccgttggcggattcaccaaaatttcatcaagcacttcttggaacgtcttcactgcaataatctcgatcccgtcaatctgctttaagatggcctgctgattttcatatgggataatcacctttttcgcaccggactgcttggccgcttttattttcggaatgacgcctccgatgggtttcacaagaccgttcaggctgatttcgcccgtcatcgcaacggtattgtcaataggaattttgtgtatcgccgagaaaatccccgccgccatcgcaatgcctgctgacggcccatcaatcggaatccctcctgggaaattgatgtgaatatcataatcagaaggcttcattcccattgtccggagcacggttaatacattttcaaccgaacccttcgccatgctttttcgcctgatcgattttgattggctgccgatgctttcttcttcagctattcctgtgatgttaattgatcctttatcttgagccgcggttacacttacttcgatttccagaagcgatccgctgttaggcccatagactgcaagcccatttacaatgccaacctgtggttcaacaccgattttttgctcgtgctttggagtaagctgactggagtgaatgacccattcaatatcctcaatcgtaatgtcctttcgattctccgttacagccatccccgctgcgatttgaatcatattgacggcttcccgcccgttccgcgtgtagctggtcaaaagatccagtccttcttcggagataattttttcaattttatccgctgctgttttggcaaccgttttcaactcgtccttttcaagctcgcggaaaaaaacctccaaacagcgggaccggatagctggcggaatttcgtttggcattctcgtggtcgcgccaatcaagcgaaaatcagccggcagcccattttgaaaaatatcatgaatatgattcggaatttgtgtattttcctcactgtaatacgcactatctaaaaagacttttctgtcctcaagcaccttcagcattttattcatttgaataggatgcagctcccctatttcatcaataaacagcacaccgccatgggcatgggtgacagctccctgcttcggctgcggaatcccagcctgtcccatcgctccggccccttggtatatcgggtcatggacagagccgatgagtggatcggcaattcctctttcatcaaaacgggctgttgtcgcatcgagttccacaaagacagcctgctctttaaacggtgattgtttatgtttttttgcttcttccaacacaagccgcgcagcagccgttttcccaactcccggtggcccatagacaatcacatgctgaggatttggcccgcataaagccgcctttaatgctttaatgccgtcttcctgtccgacgatatctttaaagcttttggggcggaccttctcagataatggctcggacaagctgatagcgcgcattttccgaagctgctccatttccttctttgattctttatctatcgtgaccttttgtgtcctttgatttttaagcaaattccaaaaatacaaaccgatgatgatcccaaaaaacagctgaataaataacgcgatccctgtccaactcatggtggtccctcctgaaaaacaatttatgtatccaattcattcctctgattgctagtatctcccatagaagacgggaataaacgtttttccggaagagttgcatgcaaaaaaacctcctgagtgttaccactcaggaggtttgtgcttatctttatgcagatgttttatcttggcttacctcagtgccgtcttttaataagaggcgaggaggctctccgtgtgtcacagttgccccggtgattacacatttttcaatgtcatcacgagaaggcagctcaaacatcacatcaagcatgatgccttcaatgatggaacggagtccgcgtgctccagtcttgcgttcaattgcttttttagcaatttcagaaagcgcttcttcttcaaactcaagctcaacgttgtcaagctcaagcattttcttgaattgcttaactagagcgtttttcggttttgttaagatcgcaaccaatgcttcttcgtcaagcttttcaaggcttgcaataaccggaagacgtccgataaattcaggaattaacccgaaacggagcaaatcttcaggaagcacttttgaaagaagatcttctttctcaagatcagcagctttattgtcggcaccgaatccaatcactttttggcctaaacggcgtttgatgatttgttcgataccatcgaaagctccgccgcaaatgaacaaaatatttgttgtgtcaatttgaatgaattcttgatgaggatgcttacgtcccccttgaggcggcacgcttgccactgtaccctcaagaattttaagcaatgcctgctgtacaccctcacctgacacatcacgtgtgatagacgggttttcagattttctagccactttatcgatttcatcaatatagataatgcctttttcggctttttccacatcataatcagcagcttggatgagcttcaagagaatattctctacatcttcacccacgtatccagcttcagtcaaagatgtagcgtctgcaattgcaaacggcacatttaaaatgcgagccaatgtttgcgccagaagggttttaccgcttcccgtagggccgattaatgaaatattactttttgagagctcaacatcatcaactttgctgttagagttaatgcgcttatagtggttatacacagcaacagcaagtgatttcttcgcttgatcttggccgatgacatattcattcaaaatttcgcgaatttcctgaggctttggtacgtctttaaattctacttcttcttctgttccgagttcttcctctacaatttcagtgcagagttcgatacattcgtcacatatatatacaccaggtccagctacaagcttacgaacctgatcttgtgtttttccacagaacgagcattttaattgtcctttttcctcgttaaatttaaacattctttcaccccttaatcttgtctcactttttcttttaccggcagagcaaaagaaaatgattcttgaaacgaacgagtatgtattgcattttaccatactttccaaaaagacggtaacaatgtgtttctgacttgcacattctatatgtatgacaaaaaacagccctgcattaactatattgccccaagaaaaagagataactcataattgtacaaaacaaggcacgaatgattcgcgccctgttttattagtactattattatgcaccatattaacggttttctacaagaaaatcaattgctttgcgaacttttaaatcttctttcatcgcgtcagtagaaccgatggcttgtttaatattttcaacaggcatgttgtatgcttcagccattttagtaagctcagcatcaacttcctcatctgatacttcaaggttttccgctttcgcaatcgcctcaagagtcaggttagattttacgcgtttttcagcatcttctttcatttgctctttaagcgcagcttcatcttggcctgagaattgagtgtaaagctcaaggttcatgccttgcatttgcagacgctgttcgaattctttcagcatgcggtcaagctcagtgtcgaccattgcttgcggaacatcgatttcagcattttcagaagctttcagaacaagctcttcacgcaatttagcgtcagcttcgttttcttttgcttcttctaaacgtttctttgttttttcagttaattcagcaagtgtttccacttcttcatcgatatcttttgcgaattcatcgtcaagctcaggaagctctttcgctttgatttcgtgaattttcactttaaacacagctggtttgcctgcaagatcttcagcgtggtactcctcagggaatgtcacttcaacatccttctcagcacctgcttcaaggccaactaattgatcttcgaagccagggatgaatgagccagaacctacttctagagagtagttttcagcttttccgccttcgaaagcttcgccgtcaacgaatccttcgaaatcaagaacaactgtgtttccttcttcaacagcgccttcttcttttacaacaagctcagcttgacgctcttgaagggcttttagttcgttttgaacatcttcgtcagttacagttgtgtcgtctttttcaatgcccaggcctttgtattcgccaagcttcacttcaggttttactgttactttcgcagtgaagattaagctttcgcctttttcgattttttcaacatcgatttcaggacggtctacaggctcgattccagcttcttcaaccgctttagggtattctacaggaagaagaatatccaaagcatcttggtaaagagcttctacgccaaagcgctgttcgaataatccgcgaggaattttacctttacggaatccaggaattgaaacttgttttactacttttttaaatgcatcatcaagtgctgttttaaacgtttcagcatcaacttcaaccgttaaaacgccttcgttgccttcttgtttttcccattttacagacatgtgtttccctccaaaaatctattcaggttgtgtcggtcttccattctaaagcaatcattcggcttcgtccaacaaaaacaaagctgccaaagatcagaatcattatgtatagatgttaataatgaactgcaaagcctgtccaaccgtatttcttataacccgttatacacaaatacaaccactatattataacataacacatagcgctttcaactatatggcgcgatttacaaataagaaatttcttcaatatcttttaacattgtgcaagcttcatcgagttctctgtcggtaaattcatacatcatatgaagttcttctctttcaatttcaattccgtgcatctcgtaaccgactttatgcagggcagccgcccaaaggtcagccgacagcaatttcggctggaacggatataaaacgtacaaatgtcttctccacaattcttctactgccgcgtataaggttggattttcatttccaagtgtttcatccagcaccctgagaacacggtgcagaatcggcgcggcatcaggcggaacaatctcagacggttcaattgtcaacgactcgccaaatttactaatgtgtacaggtttactgtactcatgctcagctaacagcatgacaatcatcgttttgataatcggatgggctgaggggtcttggaggattgttttgagcaatcctgtatactttgctacgttacggtcttttaaggaatggatgagattcatttgctcctcagggcttgccagcactttctcggtgtcaattgtatcctcatattcttcggcccaagcctcgtcctcacgatctggatcggtcattttccggctgaaatccagcagcttataaaattgctcggcgctttctgccggcagctgattttcttccaaaacggcttcaatggtgcttttgacttcttcgtattttttgagctgaattaagatggtcatgtacacctgcaaaaccgtaaaataatggccataaccttctttgagcatcttctcgcacacgctttctgcctcttccagctcgcccagctctaaaaagcagatggccatccctaagtgaagatcggattcagtatcatcatatttcatcgcttctgaaaacagttcaagcgcttcttgatactttttttccttgagtgatgacatccctttttccacaaggcggtctttcagatgaggaaaaggaataatttttgcgtttttcttgtcatgcgtcatacctatattcctttcaggcatttattttgttcaagtgtatcaacacctgtgaacaaacacaagaaatgaaaggtttcaccaggcaaaaaaagccgccggacaaataccggccgctttttcagtcttgaagccaagagcttctttgtgattcaaattgcttgatttcatcttccagcagcagcgttaatgaaatttcatcatatccgttgatcagcatctctttccaatgcgggtcaacttcaaatgaaatttgattgccttcactgtcatgaatcagctgattttcaaggtcaacagtcatttgcaatgacttgttttcatactggccgacaagctgtttccaattgtcatatggcatgcggatcggaagcatgccgtttttaaagcagttctgatgaaaaatatcagcaaatgacggcgcaatgataattttaaacccataatcatcaagtgcccacggagcgtgttcacgcgatgacccgcagccgaagttttctcctgctattaaaatggaagctccttgataaacaggctggtttaattcaaattcagggttcggttcaccattcgcatcatatctccagtcaaagaatgcaaaacgcccgtagcctgttctttcaatcctcttcaaaaattgcttaggaataatctggtctgtatccacattgatccgatttaatacggctgctttccccgtatgtgatttcaaaggttccatctcgcgcactccttacacaactgttttttcctgataaaactttctgacatcaacgaagtgtccgtgaatggcagccatcgcagccattgccgggctgacgagatgtgttcttgcaccttttccttgtctgccctcgaagttgcggttagaggttgatgcacagcgctctccctcaggaacaacatcattattcatactcaaacacatgctgcagcctgactctctccattcaaatccagcttccaagaaaatctggtcaagcccttctttttcagcctgaagcttcacgctttgagatccgggcacgacgatggcccttacgctgtcagctaccttcttccctttgatcatatcagcagcctgtcgaaggtcagtcatgcgggaattcgtgcaggaaccgataaatacgtgctccactttaatgtcttcaattttttggtgaggagtcagtcccatatattcataagcgcgaatcgcttcttttttatcatcttctgcagaaaagctttccggcgcaggaacttcagaatcgacaggaagaaccattcccgggttaatgccccatgtcaccataggggaaattttgttgccgtcaaggaagatagatttatcataaacagcgcccgggtctgtgcgcagcgccctccattcctctacggccttgtcaaattcttcgccttttggcgtgtacttgcggtttttgcaatattcaaacgtcacctcgtcaggtgcaatcaaacctgctcttgctcctgcttcaattgacatgttacaaacagtcattcgttcatccatcgtcatatttctgaatacttccccagtgtattcaatgacgtagcctgtgccgaatttcacaccgtatttgccgatgacagaaaggatgacatcctttgccgttacccctttttgaagcgttccatctacgcgcacttcaagtgtttttggacgctgctgccaaagtgtctgtgtggaaaggacatgttcaacttcactcgtcccgattccaaatgcaagagcgccgaaagcgccatgtgttgatgtatgactgtcaccgcacacaatcgttttccctggaagcgttaagcccagttcagggccgacgacatggacaatcccttgatccacactgtgaagatcggcaaggcgcacgccaaattcctcacagtttctttcaagcgccgttacttggcgtttcgcaacttcatcctttatctcaaaacgattgacagtcgggatgttgtggtccattgtcgcaaatgtattttggggtcttctgacctttcttcccttttgtctcaaaccttcaaatgcctgaggagacgtcacctcatgaatgaggtgcaaatcaatatagagaagatccggctttccctcaccatgttttacaatatgctgatcccaaatcttttcgatgattgttcgaggcatcatcttttatttcctccctctacctagagctaagaccgcttaacgtaagctgtcacacattagaaattgtattttcactcatgattgctgccttaacttcctctgtaatggcctgagtgctgctgaactcttcaccccgtgccaaatcttttgttcttttcccagaagccaagactttgtttaccgcatcttctacagctttcgcttcctcttcaagcccgaaagatgttctcaaaagcattgccgctgacaatatggctgcgaacggatttgccatccctttaccggcaatatcaggcgcggagccatgaacaggttcaaacagatgaagaccagagcttgataggctggctgacgggagcattccgagcgagcctgtaagcatggacgcttcatcgcttaaaatatcaccgaacatattttcagtcaccacgacatcaaattgattcggtgcataaattagctgcatggccgcgttatccacaagcatgtgctcaagcttcacatcaggaaactcttgtgcaacgtcctcagccacttcacgccacagccggcttgattcaagaacattcgctttatctacagaggtcactttgccttttctggctgccgccattttgaagccctctctgatcactcgttcaatttccgttctcttataaaacagtgtatctactgcttcctgctcaccttcagtgtttacataacgtttgctcggctggccgaaatacaagccgcctgtgagctcacgaacgataacgaaatcaacattatctatatattcttttttcaaaggcgaagcgtcagaaaggctttcaaataccttcacaggccgcaaattcgcaaacaaatcaagctgttttctgatgctgagcagccctttttccggtctcagttccgaaggattttgatcccatttcggtccgccgacagcgccaagcaatatcgcgtctgcatttttacaagcagcaacggtttcctccgggagggggttatgatgttcatcaatagccgcccctccaatcaggccatattcaaattcaaattcatggttaaagcgttcggcaacacttttcagtacgtctgtcgctgattctaatacttcagggccgatcccgtctccgggcaatagagcaatacgtttcttcaagttaaccgttctcctttcttttatgatccgacagctgtgtggtttttcaatccgctcatattcgactggaaaaccaattgacggttgactgcgttcaaataggctttcgctgatgcttctaatacgtcttgcgctatgccccgacctgctgattcttttccgttcaccaaaactcttacatacacctgggcaaatgcatcttcgccttttctgttagactgaatgcggtagtctaagagctccacgtccttatcgatgcagcgctcaagcgtattgtagattgcttccacacttccagctccagttgcagcttcctgaataagctctgcgttttcttgatttttcaacgaaagagtagccgtagggacctgacttgttccgtaatgtacttgcagagaaagaaattcatacccaatcttgcgatctgttactttttcttctaaaataagagaaacaagatcctcatcagtgatttcttttttcttctcagtcaactctttgaacatcgtaaagaatttattaatctcttcactgtcaaattggaatcctaaagcagtcagccggtctttaaatgcgtggcgtccggaatgtttacctaggacaagcgcatctgcggttacgccgacaagctccggtgaaataatttcataagtcgatttttcctttaaaaagccgtcctgatggatgcctgattcatgagcaaatgcattatctccaacaaccgctttgttgcgcgggacagccatgcctgtcagtttgcttactaaatcacttgttctcttaatctcgttcagtgtaatacctgtttcgacttggtagaaatcttttctggtatgaagggctacagcaatttcctctaatgccgcgtttccggctctttcaccgatcccgttcacagcgcattcgatttgatcagcgccattttcaatcgcagcaagagagtttgcgactgccattcccaaatcatcatgacagtgggctgaaagctttgctttgtgaatgttcggaacgttttctttcatatatttaaagatatttccgtattccgccggggccaggtagccgacagtgtccggaagattgataacactggcgcctgcgtcaatcactttttcgacgatttctgctagaaacggcagttcagtgcggcaggcatcttcagctgaccattgcacaatcggaaaacgttcttttgcgtatttcaccatttcaaccgctctttcaatgacttgctcacgtgtcattttcagcttgtgcttcaaatgaatgtccgatgtggcgataaaaacatgaattctcgggtgagaaccttcttttaacgcttcccaagcagcatcaatatcaccttttacacaacgggccagaccagttactgaacaatttttaatggttcttgcgatttcctgaacagctaaaaagtcacctcgggacgaagcgggaaatcccgcttcaatgatatctgccccgagtctttcgagctgcttagctatggcaagtttctcctgtgtattcaagttcactccaggggactgttcaccatcacgaagcgtcgtatcgaaaaaattaattttgcgcaacggagaccaccgcttccttcttcttgccttgtttcacaaacggcatcatttcacgaagctttcttcccactacttcgatttgatgttcgttctcgcttgcattgatagcattgaaacgaggacggtttacttggttttcgacgatccactcttttgcgaatgtaccgttttggatatcttttaatacttctttcatagattcttttactttagcgtccacaacgcgaggacctgatacgaaatctccccactgtgctgtgtcagagattgaatatctcattcctgcaagtccttcttcgtacataaggtctacgattaatttcagctcatgaaggcactcgaagtatgcaagttcaggctgataacctgcttcagttaatgtttcaaatccggctttgacaagcgcgcttaatccgccgcaaagaactgcttgctcaccgaacaaatctgtttctgtttcttctttaaatgtcgtttctaatacgcccgctcttgcgccgccgattcctttagcataagcgagggctttgtctcttgcttctccagtcacatcttgatagattgcgaacaatgccggtacgccagctccttgctcatatgttcttcttaccaagtgtcccgggcctttaggggccactaagaatacatctacatccgccggaggaacaatttgatggaaatgcacgttaaatccatgagcaaatactaatgattttcctgctgtcaattcatctttgatttcagcttcgtatactttttgctgttgctcatccggaagcagaaccatgatgatttcggcttgggctgccgcttcttttactgaaaatactttatgtccgtcttcttgggcttgagtgaaagattttccttgtctaacaccgacgatcacgtctactccgctttctttaaggttcagggcatgtgcgtggccttgcgaaccgtacccgataaccgctactgtttttccagccaatacgttctctttgatatcaccgttataatatacttttaccattttaatctctcccttgttatgttttatacaatagatattgttttattggatgacgccttttgctgggttcccctcgcaaaagccgttgtacctgttctcgcgatttctttaatgccataaggttttaataactcaataagcgcttcaattttgttagattcacccgtcacctgaacaacgatgctgtctctgctgacatcaacgacagaggctctaaacggttctatgattccattaatctctgttctcgttgaaggtgcggagacaaccttgattaaggccagctccctctggacaatcgattgatttgtgatgtccgtgactttcagcacatcaatctgtttgttgagctgtttcgttaactgttcaacatcattttctccttcaacgtgaacgacgaaggtgattctggaaacgccggctgtttctgtgtgcccaactgtaatgctttcaatgttgtaatgcctttttgtgaatagaccggtgatccggtttaacaccccggagcggttcaccacagtcaatgtgataattcttttcaaggtttcacccccaccatttcatgcagccctttccccggagccaccatcgggaatactttttcttcgctggcaacccgcacatcaatgacaacaggttctcttgatgttaatgcctcttccagcttttcctttgcttccgcttctgatgaaattctgatgcctttaatgccgtatgcttcggacaatttgacgaagtcaggctgagaagcgaatttagattctgaataacgttcttcatagaaaatttcctgccactgtctgaccattccgagacaagcgttatttaaaatcactaccttgaccggaagatttaattcgcgaataacatcgagttcttggagcgtcatttggaatccgccgtctccgacaaccgcgacaacagtagcatctttttcggccagctgtgcgccgatcgccgccggaagaccgaatcccatcgttccaagtccgcctgacgtgacccatttatctgctttttggaacggataaaattgcgctgaccacatttgatgctggcctacatctgttgcgacaatggcctctccttttgtaaattgatgaatatattcaatcaatttctgaggtttaaaaccttcttcttcattatctacataccagagcggatactcttctttccattcagcgagctgttttttccattcgcttgaatcgctttgtttgccgtcttgtttgatcagctcctgcaggacaattttgctgtctccgactacaggaatctgtgttttcatgatttttccgatttcagctggatcaatatcgatgtgggctatctttgcgtttctggcaaagtgtttcaggtttcctgtgacacggtcatcaaaacgggcgccgatactgattaatagatcacattcatgaagggccatattggctgtataagtaccgtgcattcccgccatccctagaaaaagcggatggtcagccgggaagcctccgagccccaaaagggtgtgtgccacagggatttgctgctgttcggcataattttttaattcttctgacgcttttccgtgcagtacgcccgcacccgccaggatcaccggttttttcgcactgctcacggcttccacaagcttgcggatctgcaaataattcggctctgttgtcggctggtatcccgggagattcatctcatgatcgtagctgaattctccttcaattgttgctacatctttcggaatatcaatcaatacaggtccgggtcttccagttgttgcaatatggaacgcttctttaatgatgcgcggcagatcttccggctggcgaacctggtagctgtgttttgttactggcatcgtaatccctaaaatgtctgcttcctgaaatgcatcgctcccgattacagaggttgctacctgccctgtaaagacgactaacggcaatgaatcaatcatggcatcagcaaggcctgtaacaaggtttgtcgctcccggccctgacgtggcaatgacgacacccggttttccggagacccttgcgtatccctccgctgcatgaattgctccttgttcgtgacggggaaggatatgtaccaaccctgaattgtatagcttatcgtaaatcggaagcacagccccgcccggataaccgaagatcatttctactttctctttttttaatgattcaatcagcattaatgctccgctcatcgtctgtgtacattcggcagatgctgaatccacctgtacattagtccccattttagttcctccttttggattttcatcctttaaagatcatcttttcattagctatatagctgattattcaataaaaaaagcccttccgcccacaatcagccgcgcagtaactgcgatagctaaaaggggcgaaaaggcttttctttccgcggtaccacccttgtttacggcctgttaatcggccgtctcatggatatttctatccgctttagtaacgagtgaatcaagttcacccggccaagtcctactgtcatttcagactggcactctgaggcgagttcaccttgtaaagcttcgccggttctcagctaacccggttctctgtggaaagctttttcaaggctacttatcctcatctgcgcttttcatattcagccttcggaacggttttccagctgttcaagaaggtcgtttgtttttcactttttagaatcatactgcgatgattttcgcttgtgaagcttgcgtttatcttttgttgaactcatattacgccgctttggacgcagtgtcaacagcattttttaaaattattagacaattttgattaatcaatctatattgtatacgctttcattattggtacaaaaggaattgcaaatgttaaaagtttttataatttttttattaatctatcaagaataaaccagaattatttaattttatataaacatgtaagattttataacacgctatggttcgtatatggattgagtctgacagatcatcttgcaatccatttcaatttcggataggcacccctattattcctcggcatacattaatggtatcttgcaaagaaaaggtgatacgatgaataaatcatttgcagacatgcaaggatttcctgcgggctttccaagcttccccaactttccgcagcagtattatcctgctacccctgccttctaccagcaaagccagcagccatttggaggctacggatacggacagccgttcagtcaggcatacagcccgttaaccactccctctggaatgtactcctcattcccatacgcttcagggttttacggacagcaattttcaggtgcaggctttagcggccatggcggcagcttaagtgctccagcgatacatgccggcggattcagcggggcgccaggcgtacacggaggctttagatattaaagaagaccacaagggccgaacatctattgcggtccttttattgttttaaaacgacttcacaaatacagtcacattttctgtctttatatttggaaacaggatggaatatgattagatgaattgaacgatattctgcacaatccgtaagttttcgaggaggaataaaattgcatataaaaatagacgatttaactggacgtcaggtggtttcactggtgaatgagcatttacatagcatgacgcttatgtccccgccagaaagcattcatgccttaggtttagaaaaactaagagggcctgaaataacattttggagcgcatgggaaggtgatgaactagctggctgcggagcgctaaaagaactggacacccggcatggagaaatcaaatcaatgcgaacatctgcatcacatttaagaaaaggcgttgccaaacaagttctccagcacatcattgaagaagccgagaagcgaggctatgagcggttaagcttagaaacgggttcaatggcttcatttgagccggcaagaaaattgtatgaaagcttcgtttttcagtactgtgaaccgtttgcagactacagtgaagatccaaacagtgtgtttatgactaaggaaatgtgagacgattttataaggatagataagtgcaggggaaggtctgtcttatctatctttttttatattcacacatttttcacctttatgatacacgccaatgttttcaattttgtttaattcaaagaacagcgggaattacaaacgacatgaacgatatcatgcaaattcataaaggaggagattgatatgaaaagcatagttggtgtatatgaaactccgcaggaaaccatcgcagcgattgaaggcttactcacaaaaggctatgattctgatgacatttctgttgtgacaagccggcgagatacagattatttggagtcacgtacaggaacagaagtcaatcaagccatcgatgcacatcaggacgaatctgaatcttttttcgataaactgaaagattatttcacaatggatgatacttctacacacagcaaagcattatccgacttggatattaaaactgatgaaatagacaagtatcaagaagatttggatgacggaaaacttctggtagccgtcgatacagatgcaaatgtaaatgctcctattgataacggcaatgccctttcaggcggcttttcaagcacaaatgaattggattatacaacgaaagaagaaaaaacgatgccgctccgggaagaacagctgaaggtcgataaggaagacgttcaaaccggcgaagtagaaataggaaaagaagtgaaaacagaaaaaagagatatggacattccggtgagacatgatgaaatttatgtcgaacgccgtccagtggatgaaaataaaacggacgctgctcccgtcaacgattcggaagagatcagagttccaatcgttgaggaaaagctggaagtgactaaaaaaccggttgtcactgatgaagtggttgtcggcaaacgcactgttgaagaaaatgaacatatttctgaaactgtgaaaaaagaagaacctcgtctgaataaagaaggaaaagttgacggcttggatgatgatccgttaaataacaaatgaaaatcataagacgacaacaaaaacctcaaatccatttaggatttgaggtttttcttttggtacgtcccaggagagattcgaactcccgaccgacggcttagaaggccgttgctctatccagctgagctactgggacacgttttgtttttcgctttaactatcagcgacaagatttattatatatgggatgcaataataagtcaacggttttttagaatttttttcatgaggaagaaaattttcttcctcatgacattttcatagtgtgactcggttttgcagatcctcaatttcattgcctgcttggtcgtaaaaacggactgtcgcagcatcattttctaatgtcagtatagcatagctttctgtcctgcgcaccctcggaagccggatgctacctgggttaatcatcagttttccgcgcagcacttcgcttcccgcgatgtgcgaatgcccgaagcagataacatccgctccgagctcctctgcacgatagtatacgtttaacaaggtctgttttataccgtgaaggtggccgtgtgtgaccagtatttttcttgagccggcattcagaagaagctcgtccttaaaatcgccggcaaaatcgcaattgccttttacaaccgcataaggctccaatgcaggatgcctcgtttcaagctcagagtccccgcaatgaatcatgagatcaacttctgcctcatgccgtttcgcaatggtttggagttcttcttcaagcccatggctgtcactgataatcagcacgttcatgtacaagcttcctccttatgcctccaaaagcttagacagctttttaagcgcgtcagccctatggctgattttatttttttcatcacttgtcagttcagccattgtcttatctttatctttcacgataaagattgggtcatagccaaagccatattctcctctcggttcttcggcaatatacccttcaacatggccttcgactgtttttgtttcctctccgggaatactcacggccagtgcgcagcggaaacgggcggtgcgctgttctttttcgatacctttcagctcgctgagcactttttcgatatttgcctggtcgtctttctgttcccctgcatagcgggctgaataaaccccgggtctgccgccaagattatcgatggatagaccggagtcgtccgcaatcaccattttgttcactgctttggcaacagcttccgctttcagaatggcattttcttcaaatgtatggcctgtttcttcaatttcttctgtgaatccaatttcagctaaagatttgacatcatagcctcttggctcaagaatttctttgaattccttcacttttcccggattatgtgtcgcaataattgcttctttcatgatgatcaagcctttctgtctttatttcagttctggcagagaatcacccagcacttctttttgcttgtcaatcagctcttgaattcctttttccgcaagacccagaagaccgttcagatcctctcttgaaaaagtcgcctcttccccggttccctgcagttccacaaaacggccgctgcctgtcatgatgacattcatgtcaacttcagccgaggaatcttcttcataatttaaatctaacaaaattccctgttccttatcaattccaacagagattgcagcaagaaaatcagtgatcggatttgtcttgattgttcctgctttgatcagcttgccaatcgcaatcgccatagcaagaaatgcgcctgtaatggaagctgttctagttcctccatcagcttgaataacatcacagtcaatccaaatcgtccgttcaccgagcttttccagatctacaacagctcgaagcgcgcggccgatcaggcgttggatctccattgttctgccggaaattttccccttagaagattctctgattgttctttggtttgttgcccgcggcagcatgctgtactctgctgtaatccagcctttccctccgccccgcaaaaacggcggtacgcggtcctcaacagacgcgttgcagattacctttgtattccctgctgttattagaacagaaccttccggatggctgataaaatccaaatcgaatgtgattggacgcagctcatcgtgttgtcttccgtcatgtctcatgttttacctccgattgtatgtacataaaccatttttgtcccggaattgaataaagaaagaggcagccggaacgctaacctctttctttctagtatatcaaaaatcccaatttaaaaactacccgtattcacttgagatggtctggagaccggttctgtgagcttttcgcctttttcatttacaagctctgattttccgttcactttaacagagacgctttttacatccggctgctccgttaacgtcagcacaatgctgttcagcacttctgaagaaatcattttcgtcttctcatcggcgctgccgaatatagattgattgaaatccaacgtcacgcgcccgtctttgattttcggtttgctgaccagctttacatcttcactgaagtctgttaacagcccgctcaccttgcttggccctttagccaattcattgatggctgccgtgatgtcgtctttttccgaattgtcgattcgtttggtcaccggcacgtagtattcactgtcttcgttttccgccaagtagtagactgtcagcggatgggtagcagtgagatcatttacaccggctgtttccaaattaatgccgtctttgcggcttaaatcatctgagatcggcgtccctcctacaggcatctccttcagttcatgcccgtttattctcagcttcactttatctatcgaactaaattgcgtcagtgtccacgtcacagattgaacgattttctgttcgtcttctttcttataatttttgaactcattagagaaatcagctatcgcggttccatcttttttgatgtcaacgttaacggtggtgtcagccggcaatacagctctgaagccattcggaagaatttcagacacaggcccgccctgtacgaggtattcaagcgcctgcttagccgtgctctcacttttagggagaggcagcgtttgcgcaacaacatatccgtttttatcaatgagataaagctccctcataacagtagatgaggcttgatccgcttttgcggtatcgcttttttcactttctgtttttttggctgctgttgtatttgaattggcacccgcttcatcgttcacgaatgtaacgtcttgaggcggatcaatttcctcggctgccttatcagattgaaacaaaccgcatccggataaaagcaaggcagaggtgagacaagtggcaccaatgactgcaggtccttttttcagcatacttttccctcctaaggatgtttgtactattatgtatacgagcctctttaggaaatagaccgaagaattccggcaaaacagaaaaaaacccgcaacataccgttgcggggaaaactatcttttaatcggttcttgcagtgagatacattccacatgcccgacttcatggccaaaccaatcgtctgcgatttttgcaaactgatcacgcgcccctgttgtcaggaactgatgatccggggcaatcggagactggttcagcagccctttataagagagaattgtgctgacttcccgggctgtttcatcgccggacgaaataatgtttacgtgctctcccatatatctttgaatggcttcttttaaaatagggtaatgggtgcagcctaaaatcagcgaatcaattgatgtgtcttttaacggatacagcgaggttttaacaatctcgtctgctgttttgtcgagaaacttcccgctttccacaaaaggcacaagcagcgggcaggcaaggttttcaaccttcaaatcagggtttaatgccaaaagcgcttcttcgtatgcattgctcttaatcgtattctctgtgccgatgacaccgatatgctgattatccgtcacttttatcgctgctctcgcaccaggctggatgactccgaccaccggtataccgacgctgcgctggatgtcatccaatgcgatcgctgttgctgtattacaggcgatcacgagcattttgatgtggtggttttcgagtaaataattcgtcagctcccacgtatattgaagcacctcttcttcagggcgcggcccataaggacaccgtttcgtatccccgacgtagataatattttctttaggtagctgtctcatgatttccttcgcaacggttaaaccgccaaccccggaatcaatgactcctattggttgttccaacaaaatcgcctcattttctcttcatttcatgctgcagtttcatcaaagatttttcgaagatggctatttcttcatctgtaaacgattcgaacatatcacgcagatattcctgtctttttgtaatgacctcttggataatccgttctccttcaggcagcagatgtatcctgacaacacgtctgtccgccgggtccttgacccgctcaacaagctcatttttttgcatgcggtcgattaagtccgttgtcgtgctgcatgccagatacattttgcccgataattcaccgattgtcatatctcctaattcataaagccattgcaagccgacaaattgcggcggcgtaatcgcatattggttaaggatttctcgtcctttttgcttaatgatcgcggcaatgtggcggagtgacttttcaatatccgcaacatgctccaaaggttttgatgtcatttgtccatccctcactcaaggatctcttacgcacaaaagcgttccgtgtctattttccttcttttttgaagaaaatgcaagactcgcaggagagaaatagaggactttagtcaaacaacatcaagaaataaaatttaatttatgacttgcctacgttttgcacagcattccaaatatggtttcgaatgttccaaacaaacagcaataaccggctccttccaaaagaaggaataccggcaaggattaaagctctagctcacccattctaagaagctcaacaacggcttgcgaacgccctttcacacccaatttctgcatggcatttgatatgcatatctatcgcaaactaaaacaataataatcacttgaatttataatggaaatcgactgttccatcctcgtatattacaagtttatcaataagcgctgaaaatgcttcgaataaatcctgatcagttctttccagctgtgcgaatgcattcttaatatttgatatgtcgattgtttcttcttcctcacgctcaagcatgaacagcttatcgttcagtttttcaatttgttcttcaagctcttttcgcttcgcctggaattccgccttagtgatcaactgatcttccaagtacaattcgattagacgttttttcttgttttctgcgttttcaatttctattttcgttcgcttgatccggtttttcttctgctcttcaaaatcagattttacatccagttttaacttcttgcccttttgtttcagtgttttaataacaaaagcccgcaagtccttatattgcatcggagcatggtttacacaaagagcagttccacctcgtctgtaggcgctacacttcaaataattaaactctttcttctcacgtttctgattgtatttgtacgacggtagcacaaccatattgcaaccgcacacaccacatttcatcattcctcgtagctcattccgagggttaaaacgctttttacgcatcttgtgttctttgttattagctttctcatactcttcttctgatatgatcttaggacaccagtctttgtaaacagtccatttttcttttgggttgcggataaattttttccgtccccctattttgacttgagtatgtctattggcaataaacacgccacaataaataggattctttaaaatcgtttgtactgtagacagctgccaaaactcagtcttttgaggctttacaatgtttccgagtgccaattcttcgttgagcttgagaacgattcttttatgtccatacccatgattattatgaagatcgaaaataaaacgaacgacttttgcttcttcttcattgatagctaggaatttaccttctttcttaaatccaaaaggtacacggccggaatgttcaccacggcgagcttttgctgctagtgccccgctggctgccactgaaattgtttgaggatattgggcagcaaacattgaaaacatttcaaatttcattgagtttttgccttcatatagactatcgtacccctcttcgagcgtcacaactcttacaccgtgggccaataaaacctctcgaatttcaagggcatctttaagatcacgagcaagccggctgattgatttaaaaacaaccatcttcagctttcttttttgcgccttatctaaaatgagttgcatcgcttttcgatcaagcagcactgtcccgcttatcccatcatctaattggattgcttcatctttccattcgtaattatttttctcaatccaatgatgacaaatatcaatttggttggctattgatgtcacctgttcatctttttctgaggaaacccgtgcgtaaactgcataagggtaatcttcatatttgatgatctcctgtgtttctgtctctttgaagaacactaaaccaccccattattttgcatttggtacattttagtgtgattatagcataatgattacgaacctcctatacttttccggttgattttcgaacatttgttcttgtataatttgttcaaggagttgatcagaatgaacgagggtatttatgataaaagatgggaacaaaaatttattttgcctgagcaaaggacagcgctattaaataggaagaaacaagtccaaaaaattgaaaaacccatcttagatgaataccaattggaagatatggcccgtgttatttgcgaggcgatggaattcaactcggttctggtcatcggtgtatacagagacggttttatcgaagaagtaaaaggacatgtccattacatagatgaagtaaaacagaggctgcacgtgaaggatttaaaaggtgatacaaattttattgcatttggttcagttctttcagtagagcaaaaataaaaagaaccagccacataataagctggtccttatctttaattaaagaaatggttatgtaaagctttagaaaatccaaaaccttcttctggtccctttaaccagagagaaataaacttttcgaaatctacttctttttcaatatctttcaaaattcttttaaattcttcagtaaagttatgaagagagacctcttcgccatttttaagtttatcagtgtactggctcgttaactctcttaatccttgatactgtttttcacttaaatcataagccaaaacttgatcaaataagccaaaccgatcataatcagctgctaattgttggactaaccttagttgaaaagcctgtttctcgacttttttttctaggttgtcaagcctttcttctactgttaccaattcaaatcacctcaattaaaaagctaagaaagtaaatacacttgcaatagttctagctgtagaagattttacaccagcatcaattagatatgaggaaacagtgtcaataattgcgtcctccacaacgtcacctcgtttaactaactcgtccaaagcatctgctacatcatcagtatgttttgcgaaggtttttcctgctgatccacctaactcatcgactacctcaccaacaattctcccaccatgtcgaagcgcactggctgttgccttcattgcttctttagcaatccattttttaataccatttgtgtgaaattcaccagattgttcagttgtattagttgataattcggatagtttagcaggagtttgataagtgacttcttgctgtgcctgtaatgttacctcttgagctttggcatgtccatccaacggaagaactaatgataaagagaaagttaatgcggatgttgctaaaagtaatttcttaaacatgaaatcaatccctttcttttaaattatttacatgtaaatgatagcattatatttcgactagaaaaataatgctttttactcaaatattagaataattttgaactatctgtaacaaaataaacaaaagtatctcctcgagaaagatactcaaggagactatttatttacttcaagagcgcttctagtttcgctttcgtatctggtccatatataccgtcttgaggaagcccgtacattgactggaaccttctaacggcatcagctgttttcggtccataataactatctatcccgaagtttttagcttttttatccggatagaaatgcaatgccgccagcgctgtttgaatctgttcaacagcatcactgtgcatcaatgggctcttcactttgaaaatgccagaaggcagattgaaagatgatttctttttgcttgagcttggttttttcactgccttggacgaagttgttttcttgctggatgatttgccgccaagtgcttttaattcagcatcaatagccgctttaacctcattccagcgtccctcgtctaaaatacggtgagggcaatactttccgctccaatcttggtgcttccgcactcgatcaataccccatccgcgttctttaagcagctgagcaacaaacttgatagccaacttttcagcagccctgtatttaggccctcctgacttgctgtagcagatttcaacgccaatagacttacggttcccggtaccgtttgttccgtctcctgtatgccatgcattgcgatctgttgggatgccctgccttacctctttatcatcaacagcaaagtgaaagctcgttgaacttgtgtttccgatcatatagctgacctcgttagcagcagatgcatcattgtaagtgttatgaatggtgatgtattccgcggtcatcggattagggcattttaaagcgtattttgcttctgatacaaggttctttttcactgcgattgtcataaatgatctctcctattctgcttttgaattagaaagagccgccagctggcagctcacttggttagattgtgatttttcaggacagctttttgctgatggccttttgcagtcacatagttgtttttgaaccatgctgtaaatgtcgtgccaatagtaaaggctatagagcccgcagtgtacagcgcatccgcaagctgattcacctgatcctccgtaatatccaaaggtgatttgccaagcatcagcattgtttggttgataagtgcaatcaaaagaagcaccgtccgaatgaccgtgcctttgtcaaagtttttcatattgtgttttcctccttatttttgcaaaacagtataaaaaatagcgattgcgccgccaataacgccagtgcatatcgctgtaatgatagcgccagttattgtgcgtttgatccaagttgtattctcttcgatcttgttgagtttttcgtttaatgtcatgatttgctggtcttgtctatcagaaacgcgttcaagaacatttacacgctgttcaatcgttttctggcctgccttcatttccattatctctttttgtaatgcatgcacatctggtacctccgtcacttctgacattagtacgccccccttatatctatttcacgtttttcacctccttagaggcaaaataaaaaagccttattgactggctcctgtcgtttcctcgtatggttgacctgttacttcttggtattggtcatgtgtaatgtattgtgcctgaacaccttctttcaagtcatcaacggaacaatcgttaaatgccatagcctgctttaccatggctgttgtggcccatttgtagaacaacgcaaatacccagaaattaagattcacttgtcattcctccctttaaatagagaacatctaattttaaagatgcaacttgctcacctaaagattgattcaaattttctgcttcttttcttgctagcacttccgcagtcaattgtacgcctaaagcattttgagccagctcagcctgttttcttgccagtttttcgtctgccagctgttgcccaagtgtagccagctgttctgctataggattggtttcaggaatactgccttgtttcagctgctctttgtattcttcatcagcagtttcaacccatgtttgtttttcctcatcgaataaaggccgccacataccctctccatttatttctggaggaatatcagtagcattcgccgggataatatatcttcctgactctctatcggggtgtaactcaaccggccttcctaaatagatcttatcctcaccatatgggtatattaatttcatacttctccctcctttctttaagttagaggcacatctaagtcaatataatatccattcactttagactcagtattagccattacccctgttagtttcatatcaccagatgcatatataataatcttgctgtaaccagtggttccgctagttgcaaccagtttgactatccctttgcttggagcgctagaagacgggatactagcaaatacaatctctctatcagtaagaacatgaccattaagatgcaatgtatttccgactttacggtattgtaaaggtctatcacctgtagttgccccgtttttgtatggaacatttagccacggcgtctctataaagtctaggtctgtaataacctctcgccacccagtgaattctccctctttatgctttgttccaatccatgtacggttatcataggatcttgttgcgacaattttctttaacccttgaggtggagcaaggtcagccggaacatctgtaatatcataatagtaccaggcagcatcatcatcccccggatgattcagaacacctgccccaaaataaaagccagtcggataatcaaaaaggttttgtcctttagttatctttattctctgaccgttttgggttgtcaggggatagagttgtccattattccatttgttcttatcttctttcgttacatgaatgtctgttttattttcatgagtattgacctttgtttgggctcctgctgagtattcgatttccatccaaggcgtccagttatctgatccactcaccttatttcttatgaatttccgccgattatcaggtatagaggttgttgcactggtataagctgtgaattcctgatatggataagtgccgtagttgtaaaccaataaataaccattgctattcacaggggcattcagtgccgttgaagctgaagtcatataataaaaccctgtttcaataacagtattgaaatccacgcctgacaagtttttcatcaaaccattgtcttgtgttaattttgataactgagccgcattccacttggttcgctctgcatcagaaatatgacgaatctggttatagttatgtgcgtcaaactccgttttggttgcctgtttgtcattggtaacattaccgagcccgacttgatcttttgtcaccccatgagggttgcttttatcattaatgtgttgttcagtatacgtttttgcatttttttcggctgtatcagctttgttttgcgcccctgtagtcgtttccttcgcattccaatttgaacgctctgtggctgtgatatggcgtgtggaatctgtattgtgtgcgttgaattctgttttagttgcttgctgcacgttgtctacgtttcctaaacctacttgggcctttgtgacttggttggggttatccctacgcgcagcaaattcatctgtataagcttttgctgtttttaaagcagaggaaacgtcatcctgcgttgccccgatctcttgcaattcctttagtgcatgataggccgtatactgataccagttgaaccaatccgcagggggatgatccattggtttgtatccttcatcaatggaggactgcgggggccgctgcccggcgttcccccattcaggcaattcttttgtaaaaggcataaacatcactccttaaatcggtaaagggtaatcatcttcaggctgaaagattccgccaagtgttcccccatctgtcccgtctgttgaaaatccatattgacttgtttctatagagttagcagaggacgaaaaacgaaaggtgccgtttaaatctacataagccacccgtacgcctgcagcaactgttttttgaacgatattcgaaaactgtgttgcactcattccaactttgctcaaagcctcaatgggtgccttttttacgataatggcagccggttcatcttcattattttccttgctgctgaaaatgtgtatttcacttggcttgcagttcagtgttttggctaaagcttcaatgatccggtttgtggtgccatctgaaacatttctggcaaccttgccgcgaataagcacacgataaatttcatcagtggcacggcccctatcctgcgacacgttgtcaccaagtagatccagagcctttccttttgccgcatcaatatcccgccagttctcagctgtggttagcgcgcttttaagtgctgtcagctgttcatcgacaattaaaaaaagctttccgatattgctcttttcatctttcaaaaaggcatcggtcagctttcctattaagtctttaatcatatgtgattcaccacgatttcatcaaaatgtacctgggcaacctctttaggttcaatttcaatgtttgactgtgaaaggtttgtcgcatctttccccatcctgattgttacatcagagacaccatctacttgatataccgcgttgaacaactgcgacaatataacatcatcgcccatttgtgagccggtatagtaagagccgtttgcatcaattcccccgattttataaacgaggttgtttttgatctgacttactccatcaatagggaaggaagcatttgtttttaaatccagctgcagatatattttgacttcccttgcaaaatcaaatttgacggcatggtcaagtccgctggcgtcagttatggtgacaacttgctccccgaccgtttcaattcctgcagcaacactgtcaaacagtgcttgcgcaacatcatcttttgtaccgcccagaacataagcatgaatgctttttggtgggttgccgtccgcatcggtctgcatggtattgttggcaacaatattcgccgatctgacgcctgacacgcttagcagggctgaaataatacctccgtttgtagatgctgaactgccctcaactgatttctttattcgtgcccggaattccgaatctgtttcctcgtcggcaccgcctgccgatggttccggatttgtaactgaatacacgccctctgagggctctgcctgcacggtaatggtatttgccgcaacattgtttataacgcccttagaaagcgagacagccgtccctgagcctgtcccattagcctcaattacaacatcttcaatcaattcaaaatagatgcctgattccgtagtaaactgagtttgttcttcaattacgatgccgggttctccagtaaaggacagagtcacaactgactccgcagctggctcccgcgtgatacccgagttgctgccaagacgatcgagctgcacgccctcagacttactgacaaagccgctgttataaaccctttctgcaatgtcccacaagccggcaagaaaccaagcaaagatacgaataataattcctaatggtgttttactggatgtgtttacatcctccccgaattgctcccgcgcccggtcctccatactatcaacaagctcggaataggtttgccgttgaaagcctgtttcatcaagcaagatcaacaccccctatctcaattgtttcttcatcctcttttgtcattttcacatgcaccgcaagactgcgagactctttatccattaaaaagttcaccgattccacactggcaatacgctcttcttgagaaatggcatttataatgtcatattgcgcctcttcttgatcaaactgctttcttaaaatgttgctgcgatcaaggccgacatgttcatcaagctcaaactctcctaaacttgttctaaggatcatttctactgattgagccagctcagcatcaccctcaaccatttgtaactcaccattttcaaaacaaagatccccgtctttaagcttgagagttttcatccttcccacactcctatgacaactggatcgtttatactgtgtgtgcgcctcgaatccggatcaaaggttttattgccgtccaggttatccagtgaacgttcagcaaacgaaacaaacacgcaggaccctactttaatatcagcttcgacgtgtttcaaaacaggcgcatgctcgattaaagggtattcatgtagatactcaccatcattggtttgaaacagcaatttcagatcggcagtgtgtttctcagcattgtaatttacaacccgtgctggcgccgttgtatggattgattgttttatccgctgttcgaatccgtcaaagaactttgtcgctttactcattaaatcaccctacattctgtgaaaaagtctttaccgtcaaaggaatgagagccatctttcacacgatattttcctttcgctgtcttgctgtttatttctatgattgaagcaactgcgatacgatgctgcaataggcacttcaccttataccctttgagatcatcttcctcaaattgttcaggcgtttccacaagtcctgttgcctcttcgagcttgaaacgttcgtcatccccttgactgagtggccgaataacaggacggccgcgccgataatacatgactgccccagcatcatgaatgacctcttcaagattgttttcaatcaatccggtgacacgatagccttttttataaactttatttttaggcagaatgatatttttcacttttataccgagcacacgcagaagcttatcgacaatttgccttgaggttgtgccagccttgaacgtgattttcatgtatctcttacggtatctgacctctgtccgagtgccataatttcggaccgttttatatgtccggccgttcttatctttttttacagtcaccactggttttgcgagcttgtaccgctttttcacatagtatttttcagcaggatcagcgttttcagtggttactttcatatgggtgtaatcatcgccatcttttgaatagatggccgttaccttattcaaaccgtcccaattattcagcaccttggtaactttaccgatagttaaaacaccgtaatcgtctttataaccagcttgaacagtgatagtgctgccttttttaattttgctgattgaatctttgctcaggttgtatatttcaacctttgtttcattcggtttaaagtcatcatcaaacgggacctcaaaatgaatctctaagtctttataatcgaaagtggtttgtgaactgccgttatctatcgtgaccttaacgacgcgcccaaacagcattttattcgtcgccatcgtcttctccctccgcatcgtccgagacatcatcaatataaagaaacacggtttgcataaaattctcgtatgtaacccgtgtttctgtattcgattcatccatagggataagggaaggcgcaggcagtttctcgtttacaatgtcttcccacaaagggacgttcaaaatcaatttttcgcccagcacgattgattccatgtcttgatcatataaatcaagtgaaaaactatcgtctgtttggttgtaattgatacgcaaaatgaacgtgtcatctgctaaatcaaattcaaactgctgtggtatgtcctctttgtcaaaaggaatgtaatctcttgatgccatgcctttccctccttcatctaatcctcattttgacccctatcggaattcttcggtccggccagggattcaaccgacgcaaagcatttactgtggtgccgtatttacgagcgcagccccaataagtgtcacccttcttgaccttgtggtataacttgccggatttttttgttttcttcttgctggctttcttctttttcccggctgttttcactttctttttgacccacgggctttttgcaatacggatttcttgcaactcaattgaaatagcaaaaccgtttgtgtaatcgcctgtgtcgcgatctatctttgtgatgatcacatttttagcaaccttacgcccggtataagtcaaaagagtgccggcataagcctgctttttcagatattcataatcactatttgctgttttgcctaataaatagccagagactgttgtcgtctctggctttctttgtacatggtccgtgatcggaacccctttttcaacgggatatgaagtgacctccacatccgcgccatcagattccttttcgtttacgagattaatctttccgagcttcgccaattaataagccccctctggtggataaagcgacttcagcatgtcgaaaacttcgtcaaatgtttcagttacagcctttttcacctttgtttctgccccttcactgccgccctcaacttttacgttgatcgacgggttaaaagtgatattgacagatgaactgtttgagcttgtagcagccttttctggtgtgtaaccagtatccgcgccaagctcccgaccgagtgcagcatacattccgagtgattggtttctgtatcgtggctcagttgtgatgacatactccctaaagccgttttcaccaagcgcagcgacttgtgggctgttaatgactccacctgtcgcataacctctatacggcccaccatgagccatagaaacgagcccagggtgttttaaaataccgccgtatctgctgttcaaatagttgatagcagcaaggatctggtcaactggatttttgatatttccgtgacccggttccttgtgagcgttgaatgtacttggtataaactgcataagcccttgtgatggatggccagctttcgcattcgaatcccaattgttcacgacattaggattcccgcctgattccttcatggcaatagtttcaagtgcgccagcatattcagagccaagccccttgattgatagcgcttgagctacccactttttgacggcttttgaaccgccacctgaaaagctttcagcgtaactggacattttgcctttaacaaaaccaacggccttatctttgacaaagttaaaagccccttttgcgatatcaccgaacgagccagccatagaaggtgcagagacacccattttttctaagacttttgttaaaagcttagatgggtgtccgatgtaatcaaaaacatcaagagcaacatctttcactttacctgcaacggattttacaccattccatgcttttgtgaagatatttccttctgtacctttcgcgtaagctggaactcctgataaagcagcccttgtctgtttagcagataacacctgagtgccttttgggaggttcattagtgtatcacttgcagggctgagtcccacatgacctgatggagtacgatacatttcaggaccagcgtttgcccctttaccgtctcccagtatagccgggcctcccgggtgtccgccggttccgtgtgcatacttaggtacaggccattcaggtatatgtttatctttcaaaccgatcttatcaagtacccagttcactccgccgattacaccatttactccttttccgagtgctccggcaagtttgttcgctaagctagtcacaccagacacagctttatgagccatgttcttaattccatcaccgattttacccggaagtttcttggccccttcgactaaatcattgaaacgatccataactttttgacgtaaatcaagcgccaataacgcgactttattttttatataaagccatctatcagtgattgctgaacccatattacttacaagctttttcaccatgccgacagcactagaaaaaatttgcttcactccgtcccacatcatgcggaaattcccagtgaataagcctttgaaaaccttcactattcccataataatgccgattgcaccctgtattatcgcaatgatatttttaagtgcaacttgaattattgagagcacaaccgggaacacagcagtcacgatatttaggatgaaacggatcgccggaatgaccacagttgtaatgatattcgccagaaattgcaaaagagaaacaacaatcggaagtaccgcttgtatgatttgcatgatctgcgggaatacctgctgcacaacttgaatcaaaataggaagtgctgcttgcgccaactgtaaaatgattgttgccgctacagtaagcaattgagccacgattggaagaacagccatgatgacttgtttaataatcgggaacacttgctgcaccgctgataaaattaacggcagcacttgaaccgctatttgtccgatggatgaacctaaaagctgaatcaattgcaaaacaatcggaagagcttgttgtacaatgctcaggatcaacgggaacgcaagctgaatcatttgaaccaaaatcggtaaggcattttgcacaattgaaacaaggattcctgagaaactgcctatcaattgaataatgattggcagcactgcattaattacgctcagaatgactggaaaaatcgtctggaagccttgaacaagtaacggtaggatgctgcttgctatttgcaagacactcgtccataaagtacccgacaactgcatccaagctgaaagcaattgctgaatcagtggcatgatttgcggaccgattgtctggaacgtttgcgagatagctgcagcaaacaaaacaagcgtgccgcctatttgaacgaaagcctgctgaagttgtccggccagctgctgaaactgtggcgtcaattgcgtaaccaattgcccgaaagactgttgaagcgtgttgatgattggctgcaatgcctgaaaaacagtcgttagaacagattgtaccgatgtccatgccgtctttaaggcctggcttacattttggtttgtttgttgcatgcgatacaaggcgccagcaacactcaaaatagcaccgacagccacaccgattggccctgacactccgaggaatgcaagtccgatcgccgcgacaaacggagcaacaagagaaaccatacctttaaagctggatagaccgactttcaactgctccatgaatcctttcacgatgccgtttagaccgtctgatagtcctttaccgaagaagtccgagactgtctttccggcattatgaatgaagcctgacacggttttcacagccgttttataggccgactcaattccagccactaactgtggatgcgattcaccgagacgatcccataatttcaaggattcagcctgcattttatgaatggctgtgatcgccacgttttgtgcgtccttgaatcctttcatgaatgcaggttttaaaccctcagcttctttgatcatggtatggaatgcaccgacaaccgccgatttccccatgtcagcaaagcgtttcatcgcgtctgtagctggcttgaatctttcctgaagcttatcgaaattcttgtacagcaaataaatgccggttacaaggagaacgattgcccccgcaacgacatacaccgtgcccgacatagcagccagcccggttacaactggaccaatgaacatccacaaactgctgagagctccaaggaacccattaactaaccctacccctatcgctagtggcgataaaagtagggttaaaacagggatgagaagcataaatccttggatcattttcgagagtacagggtgcgcctcattaaactgaataatcagcttcgcaacggccgtaatgcccttgtatatcgccatcgcaaacgccgcaaacacttcgattgctggctgaatggctttcagtagtgtgctgcacatctcttcccatgcctttgaatagccgggaactgtttgtgttgctgctttatgaagcccttggaacatgaaaaagtttgtaaaagccgcgcccagtgccaccatttgaaaacgcatataaccctgagtgatcatcattgtcatatcgttaagctctttcatgttggcagtaggtccgagcattttcagagccaaatgcgcagcagttccctgctttgccatgttctcaagcgtattcgatacggcaagcccagctttattgacttgatataatgggtttcccattcggtcatagttcgccgcaatcttctcagattgagtggaccgagccatcaatgtccctacagtctgcagcatgctcatgcgcatcattttgttgtttttcatcatgttgtctgttacttgcttgtgagcacgtcccagcctgtacacttcatccataaactgctgattggtgccagaccagctgtccatctggttccctaactgaaagaaaccatactgggctcggatcaattcattccgaaaaccgttcatgccatatcgttcttcatgccaggcttgacgcatttcattgagcattcgtattgtatcggcttctagtccacgggttgagccgcgcaaaaagtccatttcacggttatactgccggattccccggtagtccggggccgggacagccaccgcagccacgttattctgaacgctttgcgtgttctgctgggtaacgtttgctgcgggcgtaccgatacggctcatatcgacgttattcaaattttgcctgagttgatcaattgattcattggcgtttgttatagacgtttgatcaacattgatattaacctcagacggaaggctttgaataagtctgcttgtctcttgtacctgggtattcagctggctcaaacgggatgtaactaagtcgatttgaggccctagccgttctatcgtttgactggcagtttgcaacgatgagttgtccaagatcatactcatatggatgtctctaaaattccgctgttgcctttgaacctgagccatccgtgtacgcatctgtgaaaaactgccgccagcatcgccgacatgatcaacgagtctatctatttgctgatttgctctttctagaggggaggtatcaacgttcaattcaacgtcaatatgcgtacttcttaatgcttctgacaacgttcataccccctcatttcttgttattcctcttgttttcttgctcaatatggatgtcgagggctgcatttgcctccattagggtatcgagatccatcatcgcgacctctgagaaggagaacttcccagacatcacgagtctatacataggccagttgtcactcgccttctttttgtaatacggctttggtttgggtttcgtcgataagaaaggattgaacctctttcattaattccatgaaaccttcgtgttcatcgaaatattcaaagctcactttcggttggacaacgacttctttcatgaataactcatacatagcagctgaatttggtttacctaaattgaggttgactgcttcgtcctgaatttccaccattcgctttgttcctgggtgttgaagagtgtactcaattcctttgatagttactttcttttgtttaccgaattttgacataggttttccctccgcttgtttagtttgcatatattgaaaagcagccctattggactgctttcgcgcgtttgatttcttcttttttgccatagcttaattactgttccaatactgtatagtcaaagacttgaatctcgaactcacgatctccaatctcgtcactgaattcagcatcggcaggctttttgaccatcgcttctgtgccgccgattttttcctgtccgcccgtaacccagatagggaaacgctgggccgtgtttgccattttattcaggtatggtacaaatggcgatcccatggaaagagtcagtgtaattgttccgagtgggttgtttttcgttgcaacactgacatcacccttggcgctgactttagtcgagaacttttcttcgtcttttgcacaagaaaccattgtgccctcggaataaccggttacgattttcccgtcaatgttcgtgttgacttcgtttgcatcataaacgtacatgctttatatcctccttaaattgagatttcaccagtgatttcagcagaatgaaccgcgccagccagttcaaaagtaaatgataggccgtcgtatacacggttttttctgttttcatctgtgatttgatcacgggtttttgtgctgattgaatacactggctgcccgtctgcatcttctgcaacaatgccatttgcaaaggctgtttgcagaacgtttgtgacctgtacactcagcaatgaaaaaccagcattcgagaacgggattttgccgttgtttgagaatgctgattgtattgaggtttcaatattcaatttcacccaatctttgccgtgcagcacgtcgatatattccccggatgcagtaatgccctcggatgtctcgttgtggcccgctttggttacataagcaatagccccttctgtatgcagctttttcaactcgtctgccttaatatcttgaggcgtgatgccaacgatatttttaaatttccaagttactgatcccactgtatgtgaagcaaccgaaccaacaaggccagcgtccggatgctcgtcatttaacgggtgatagaaaacaattgtgcgatccttgcctttgtaagaagcaacttcttcccggtcagttacctgtaaaactacaaatttatatgatttctcttccatcgcttttgccgcttccattctttcgtccgctgtagcatcagcaaggatcaagaagtgccagtccttgtcgaaatactcgtcaaacgcattccgaatggagaatgttgcttgtgtagtcgctccttcttctggcgtttctgtgctgcctccatacgtaccgatggcaacctttgacggtgcattgtcaccctgagcaaagatagccgcagcctttttatatgctgctgtggtttccggatagtctgccttgatagcttctaatgagccatattctttatatgtgttgtgtccgtctaccttcgcaagaatcagaggtgttcccaatcctttaaggctggacggtttcactaagtcaattttgactgtaacgtcactaagtggcatatgaattaccctcctgtattttcaattcgtacagagtcgaaaacctctgcatttgcttctccatgagacacacgcgttctaaagcgtgtatcgaagccgtgacggcgttctgtgtcaatcgtgataaatgtatctcgattgccgaaaccgtcgttcctgacccatgccagcccattatcatgaagcttttgtcgcgcttcagctgttttgaagtacgctgctgtttgttgagcaagggaaatggcctcaatatggctgtttgaaatccatgtaaaagagaaaacaagctcgatgtcttccgttaacactccctgttcttcaatgcctctatgttggggcaaatacggggaagtcacggtatacgtacaaaaaggatagacaggttgtttccctgtaccatttgcaacgataacgacatggcctgttttctctctaatcagtcccaggactgtttgtattatgctgttgtagtccatctgaattgatcaccgcctttaagatatagctgttgaaatcggcatacgtcccataaggcgtcatcgcttcaacatcaaaggtggcgccatcaaaaatcacctgagcttttagaggaatttcgttcttgataaatagctgcctgtccatagatgtaagccggccgccagattgatagacaagttgtgactgtaaaggtactattgcccctctttcatctgacttcgtcggtttcggtggcacccattcgccgagatcatcatatgaaccctcttcagatggaataagcaatgtaaaatcaacgctgtaccgcttaatcagatcagaaaatatgaaatgattccccatcagctttcaacctcataatccatagagccaatcatttccccggtatcaaccaatggatttgaagagcctttctcttcggttgtaaatggatggtttgccgggttccgcaagtctcgggcatacacttgaagccgccctttcgcaagcaggccgactgtttccatgatgtcattcatcgaatcgccattctctaacgctctattgaccagatcctctaccttttgaacgatctcttcctcgttctcgtcccatccagcacggatgaaagaacgctccggaatgttgatatattgagtttctttcttgaggtacagcccttttgcagcaaggtagttccgcatgcgatcagttacagcaatacggcagccaaattcgtgaacagccgcgatcatttgccgttcactgtccaggattccaactttcaccttaccgacggaaccgaggtttcttatgacttctggaatacggttgctatctcgtacccggacgtttctacgtgccattagatcacctcagtgccctaaagcgtatttttctgtagggtcggaataactcatgaacaggattgagcctttcttcatcagctgcataggatctactcatgcctccaattgattcagatagaacaccggacgggctttctctgtcaatcttaattaatagggcaatccccttttttacggccggaggaagagacacagtattatctggaccaacaaagagattgttgcagtatgccatcgcatatgaaatactatcttccagatcaatttgcagtttggcatcctgcgatgtgtcttcagctggaatccctaacctgacttttaattctgccaagtccatttttctcattcctttcaaagaaccggttcatatgtcgcaaaacatcggcaattaatatcattggatggatcaccgctttgtcccggcgcttctgctgttacatgaataccatttttattgatgccaagatcaaacaactgattgaccatgcgttcctgcccttctaaatggacatgatccgcatgttttgtctcacggactctttcatcgccaacgttgtgccaggtctttttcatgttgatgccccgtgactgagcttttttagcagcgtcaagcgttgctttttcccttgtgcgatgcatttctgtattggctatgcgcttcgatcggttgtaactcaggccgacatctgtctgcagctccttcgctatctgagcaaagcgtttccgctcaataaaaccgcgttcgattgtcttgttaatctgctgtattgtctttttgcgatcagtttcaatggctttgtccatttgtttacttttaatagcctgctgaacgtctccgggagcccattcagcaggtaaattcatctgattcagtgttgcttttggctgcgcaagtttgatccctaacgcagccagaacgccaaatatcagccagctgtaagatgattcgtaggtttcttcaaggaattctataatcatagctttgactttcgctgaaagatcactaatcaacgaggtgatttcccgctttatacggtttagatcaccgtgtcgattagcgtcagcaagtgtcggttcttcgatttgatcaagcttgacgaataacgcagtcagctttgacagcacctcttttgaagcacgctgaaaaagccgcttgagtttccgtaagaattccttagttttacggttcaacggcttcaaaagctctttttcagtttgttctttatccaccgcttaccctcctactcctcggctgtttctttggcgtcagactcttgtgtgtcctcggcttcttttttatttgtgcccttgtccagcttatatccaagtcccttataaattacctcgaaagcacgttccgtcacttccaaagagtctctccccttcttgatcctaaccattaggcagtggcacctccatcaacagcagggactaaggctgcaaaggcatcctctgcaagagtagtgaatccgacttccatagttgctcgaagtgcgaacatgtcacgctcgaataagtttagaggttcgccggcttcatctacagttgttgtcaacgttgcatcctgagaaatggtatattcaatgtcctgaagaataccataacgcgcatagtcccaagcccctgtaataaggtcagcttttgttttatcccatgatttgctgtcaacaaacccaataggcaacccaagagcttgaggtgttgcatctgctgtcacttggttaaatagtggcagcccgttattatcttttgcagcgcgtaacttttgacggaaacgtctaatagttgtaaatgcatcaggatctttgtctgcatcttctacaagcgccattactgcagcgagatcgtcataaacagttgcccctgaacccgcgccagtaccagatgtgatcttttggccggacttgttgactctttccatgattgatacacctgtctcaaaaggcgatcccaccccaaacagtgcggcttggtcaaacttgattgcaaaagcttctctaatagctgattgcatttgagtaaagaagtcagcaactgtgtagcgtaagaattcttttgaaactggaatgataaccgcaagtttcttcgatgtcatttttgctgtgagccatttggcgctgcttgtttgaatgcgttcaccttcaccaacccagtaagcgccaggtccttctgctaagtacgtgaatgtctttaccggttttgtcatcggttcatatttagcaagctgtgtgattgcagatgtctgcataaattctttcaacacaatttctgcttgttcttctgggattttcccagttactgcatcttgtagtaatactgttttgggattaaatgttggcataatagccctccttattttctgatatttgcttggttagcgagtgccccaatatcaaccgccccgccagctggtgttggatcacctttttcgaagttagtgccgctctctttgaatttgatatctacagcattttgaactgctgcattgaatgtctcttcaaacttactgagattggcaagtgttgtttcctcgtcttcgccaataaaatagtcaataactcctttaggcagcttcttttcatccgctacattcaaggctttattgaccaatgcttcacgatttcttgctttttctgcatcttctatttgttttttgagcttctcaatttctaattcagccggagatttatccggattgcgttcacgaattttctcttcaacgatgctatccaaattgtttgccttccatgttgcaagaccttttgtgaagtaggaatccaggcgtggctgaatgaatcgttttccctcttcagtttcaaggaacccttccaccttatctgctgatacggccgaaagttctcccacaaatgcttttacttgttcattgtctttattatcttcgagaaattttttcacttcttctaaagttggcattacgtttcttcctccttcgccctctacagtacgcgcctgttatgagtgcatgaaaaataagcctttttaaagtcatgctcaggacaaatacagatgatcactttgcaacctctttgaagtcatcctcatgtcgattcttatgccagtttctcgttgtattgtattcatttttcgctaattcccattgccatatatctatttcagcaggcggattctctccatttgacaacgcaattgctttctccatagctttttcgaatgtagggtagattcctaccttatggggatagcagtcataataatcatcactcgtgtactcaacttcaaagaacgtcattacttacacctcgaatgtcatcattgtccttttcatcctcaaaatcataagcatcttgttcagctttcattctctcaatctcgtattgcacatcatcgacaatagagagtgttgaaaggcgtgtctcttcgcttacctgacctttaagttgtccggatgtctgagcctcttccaagagatttgacggcagattgcgcttgaatgagaaccatacctttaaataatcacctgctgatacaagaccttttttcgcccatgctgagcaaagcaatttgtactgataccgaagggcagcagtcgttttcctctccatcgtgatgcacttattttcaagggccatcagcttgtatttcattgcaacgcctgtcacattcccgccgaatgattcatcagagaaattgaccgactttgcaaaacgaagaatgttttcttcaagcctgttcagatggttttcgatcatggtgtcattaatgtcttttgtcaggaatttggcatcatcatctttcccaaacatttcaagcacaccggtctttttcagttcttggatgtcttcatcatccataccagcgccctttaaaatcaaataagctagccgtagctgttcaatctcgtttgatgcatctgaaagtgtgcgatcgtatgcatctataagtttaattaccttttccacgtcgcccatctgttcatcattgttaggcaacccgaataaaggacaataatcaaacaagtggagcttcttctctaataaagtccagccacctttttgtttttcgaaaaaataggccatcttgtcatcgtaaaaagtggctttttcacgctctatgctttgattattgacccaatcaaataccttataatatctaagtgcgaaagaaggctctgtgatgtcattctcagcaataatgacaacttcccatggatttacattcgcaactcttaccgagccgtcaggagcgatatacacaagtctagcaccatatccacaaatagctgctttcttaccccattcgctatcagcatcagcaatgttatttatggtgttaaagttattgatttgctctgccaaggccgtatttttgttttccccgtctttctccgtctcgtatgagattggatggccgaacatatacccaacctttgtatccactatctcagcatcaaaagcattattcaggcggttgtttaccagatggtcaatacgccgaacctttcctgtttcaaaatcatcgaattgagctgcctcccgctgtaagatcggcacaccggcaacactagccatatatcgttcatactgagctatggctttatctttgatcggcttatgctcttcaataatctgttcaatgattggaccgtctatctcattatttcgaagataatttaaaaacttgttcatgttctcacccctttcctttgcgtctcataggtttgttgtgtgtataaatggcatatcggatagagtcgagcacatcgtcccactctttaactggctcgcctgtatttggattccaaacatacataaagatctcttttttaaagcgactaactttatcttcaacaataaaaagcagatcccgtttgaacagccgcgccacttcttcgatacctgaaacaactgccttatcagcatctaacgcacgcaacttctctctgcgaaaacgtacgatgtgttcaggccgagctgtatcacaatagaaattaatgttgccgtaccgctctttgatgtctttcgctaccttcacccagtagtcaatctcttcgtgccgcttgcaatgttcttcaagcaaataaaaacacccttggtcatcttgtccgattacgacaatagaacccgggtgatcatatccccagtcaacaccagtaaagtatttagtgaagttgacttgtttatcttccatttctttagaactgatatagtgcttgtctttgttaaaatccttgtatattacgccttccggagcaacccagtagccgtaaatatccctgtccgtaaacatgccgctcggtgttgaagcaacaatactttcgacatactcaggatcaagaaagttgttatcaaacaatgagaagtgaaaagaacggatattcagcctgccgtttttcagccgctgcccgtctttgtcgatataatccgttttgacggtgtgcattgggttttcagggtttgtatccatcatgaccattgcacccttataggagcaacgagaaatgacttccttcacgaatgaatcatgcagggcagtcgcttcgtttaggaatgcgccagctgatgtgaaaccccgtgcctttttccatgagtctgcatttgcaccatcaaagcaataaacacggtttccgaatatctcaacggcattcgctttatcaaggcgcaattcttttccaaggatcagttctaaatcatttaggatattccgctttatagaagcctgagttgccccgccaatgataaaagaaagccccatgttttgatatttgctgatgtgcccgaggaacgtcaaaaggagcacgaatgttttccctgcccttttcgccccgctgcatattaagattttcggctgctcttcaataaagctgttccatacttcttgttgcttagagttaagttccatgaggtttcaccatcttccgaagcatggcagcaacttcattttcttgagagtttccgttatcaccatcaatatctttcttcgccttctcgatattcaagcgcatttgctccaatttaaggcgacgttcgtcttcttcatgcgccagtagaacaaactgttttatcaagcttctgagctctcccattgcccgagattgagcattcaggaatgtggcctgacgatcccaagcgaactgtatttcaagttcttcctcaacaatagacttttcaaaatactcgtttccatcttcgtcctcttgaggttgataaacgtattttgcttttttctgttcttttacaagatcatctttatcttgtacgaacatgataggctgcgcccgaataatggctgcatattgaatctgtatctgatcccatataatatcagcaggcgaccgttcctgaatctcttccatgatttcaagcgtttcttctggcaggaatttagagaaaaagccgtgagtcatagcgttttgattcctctgtggtgcgccgccgttattccctaatgcattcttattgccgggtggtgcgcctgccttttttgtgtgcacacttttttcagtgggtgcacccttttttctttcccaaccatgccgctgtttccacgattttatggtgttcactgacaccccgtatttctcggcaaggtccttgtatttcatacctttgacgtaatctttctgcgcctgaatgtgcttctcagccatctacattcaccgccgcccccttttgaattgagttgttttggaaaaaatattccctctaaaccaccaccgtgctcaagccgttaaccgccaattgtctatcctgagacttaccggaagcagtttacagagaacataaaaaagagccatatagtttaatggctcttcctttattcaacaatttcaatatgtgtaatttgagttgggttaataagaatagattcaccaagatcaatcagacgatttttcaaaactctttcaccatccaattcatcatgaaaatagtctataagattttccacatctttcatatcttcataagaaatttcaaaagattttttattactcattagtataaacactttcataattttcacctcccacctaattatcggataaggagtgtgacaagggaactatttgcaaaatttgtcgaacgaaagcgcccttcataaataggtggcagtcgtaagacaaaaaaagcatccccaagggatgccttatttaatcaaatctcttaattctttaattgtatggaaccattcgcaaaatttgtcgaacaaagacaaaagaatatcactttttgtttcttttttttcggttgttttttgtctgtgtttctatttgcacactttcagtttttttgtttttcttctcttcagtttctaattcttcaattgcttcttctaatagcattttataagtacgtagttttccataataattaagattttttgtcacaatccatatccagagaccgattaaaattaataataaaatcccgttaaatattactatataccttccgaaggttaaacccgttttcacaatagtatctaaaagttctgtcggatctatagaatgttttttatcaatatttactgctatgttggagaaagcattaaaagtgttaaaataaaacgtaaaaatacctattagaacactgatgagactcgtaaatagtgatgtatatatagcaaatgggatagttttaaaagaggaaatgtctcctgaaactttaaggctgttattcaatctggaaattaatttttttatttgttttggttctagtttctttttgactttctttttaaaatcttctccacttttaatattggaatcctttttataaggtgtaccgaaatgctctaagtatttagatacatgagttacttcgtcaaacggaatttctctaatttcacgattatctttttttcgataattaaacacttttctccataattcaaccgctaattttttcactatatcacctcctatattttatcggacagacgacaaaacttcgaattgcttgcaaaatttgtcgaacgaaagctctattcaaaaagtcagtcttaagacaaaaaaagcacccttcagctgcgggtgctcatttcttcctatgcttctggaattccaatatatcctctttaataaaaagcctgtccctcggcatttctttaaccggttcaagttgaccggttttaattagctgattgagatattgacgagtaaagcccaatatttcaatcgcttcacttgtattaacgatctcctcattcaagaactttttaattgcatcacgctctttaaggctgtacaccaagcatcatcctcttttttctcgatatttttgataaagggaaattgacttttccacaattgaaacagcaaacaaaacaattatgcatatatctaaagttgtctttaatggactggctgcgacatgctgtcgaacaaataacatgtatcccaaagcaagaaggacaaaaatatcagttgacattcttagtttttccatttgtttgaaagtggctgctttcatcgttatataattatttgtgtcacttatgttatacttggagcaagggagaagctccaccttctccctcggctcaaaatcatctacgctttcttggtcgtctgcgtcttttgattttgggcttttttgttttaagcttttctcttatgataagagctttttcaaagatagtgagtgctgtaagtatgatgcccagtatcactgcaattttagccactttcgttcccccctttctatactttaattatatacgattactttactcacgtcaagttaatttagagaattttttcctgttttctcataaaaaacacctattcatgctaaacagaataggctgtgttctgctctatttttcattttcaaacgggaacgctcaatgtttttctggactgttccttttttaatgttcagcagctgggcgatctcctcgaaagacatgttttgcacagtatgcatgatgaaaatgtccttctctctttcagtaaggacagaaagggcatcagcaattctttctttgtcccagtcgcttacctctccttctggctcctgattgatcgcatactcttctggcattgcatcaatgatacgaggatcagcaagaatcgttctttgataaacgtctcttctgtcagctccccggcgtgctcccggttgtctcccgttctgcagccattcgagagtgaattcaatatcgctaatcatactgccaatgattttcttatcattcttttgttccgctgtcatttcattttctggtgtttctgagaatgcccggtacatctttctcgcttcttttaacgctcttttgtattcaatgattaaatcctgcatgtttgtcctcctcttatttacgcttaaaagcgccgcctttgcatcttctgagtgtttgcctgtctcgcctgccaaaacctttcagaacgctccttcgcgtttttactggactttttcttctcttgtttcatttcgtccctccgttcaaataaaaaaacggacaccaaccaaagtacagaattctctgtacagtgatcagtgtccgcaggctttccatcttggactttatttaaattaaatgttttttcgctatagtaaataatggcatagctatatcaaataaattcttctcaccaacttttttatagactactatatttccatccttcgttaacaagacacttagaatatcatcttcgttttctattggattcggcacatctaaacgcaaagcagaaataattccatcactttcttcataagaactccaattttgactcgcggtaacagtacccccacctaaataggcaacttctacatcggctatttttaaatctctccaccaaccaccttttattgcagcattatcattttcttctaattcttcttttagttttcttaaatctatagttatagcttgtgagttatatcggttatccccacgtcccacagtcccatcgattaatcgcttaatcccgtgttcaataattgattttttggaaccccaaaaatataaaaaatcatcatctgatttagccacattgaaagtttcatcagcagaaatagcaattatatcgtgtgccgttccatcttccaaatagccttttcctgtaaatgaatctcctattggatgtattacttgatacttttttaaatcttcttctgtatattcagtactacctaggtttttaagcgtagttttaaaagattgactttcagaaccagtattaaattcatttgtttctaatggtaattgttctgggaaattgattaatctctgcataataattgattgcggcatttaattctctcctcacaaaatcaatttaattactttgtccaaagctttaattaaagatgttctttgatttgtcaccaaaactatattcttttcatgcgcacttaactgtacaccaggattacttttaattttaatattaaaagataatatatcagatggcttaacctctttaataaagtgttttttcatgaagtcaacttttttagtgtttttagcaactttcattgtatacttattctcttccacccctaaatcatcacaaatcctctggtaaaagtgaactataaaatcttcaataatttcttgtccatttttatactttaaagtagcagatgcacttacattcaaattcatctgaccaaaattatctgtttggataatcgagaaataaatcttgtatggtttaatgtacattttaacgttgttaaacttatcaaaagagacttcgactaactcatttttgcgccctgtatgacctttattttttagtaaatcataaaaaattgtttggacttccgtataatcatctttaattttttgtagagttgaattttcgactatgttaaaaaccgcttgaaaatctatatcaaaattatcgaaattaaagtgatttttcacccatctaaaacccactctaaatttttgggatttgtcatatatagttttaagtaaagctgctaatgttggtaaaataatgattcctgttgcccaattaaatccttttgtgtaaaactgaaaaagcattgttgcaagaagactgagtagcattaaaacccacatcatctagcccccttatctaataatgtcattaattatagccataagatattgcttggtaaacattctttagaattaaatcaatcaacttcctctgtctaatttacaacaatgtttatcttttccacagttttcagtacaataataccatttattttcatattttttctaatttttttcaccctttttcacccctccatcgttttttcttttttgatgaattattttcaaatctctatttcctcctcaactcaacgcccatgctgcagccgcatttcgggcagcgtgcatctgggcggatttttatatctaattcgttgtgaccacattcaggacagctgtattcgatcatggtgtcaccccctattcccagccgactgcaattgcaaagaataaaaccaaaaccatcgccccgattagccagccatttgtcttatcacgctttgcaatgattgtttcatcaccgatcattttcaaatcgtctgactttgccacgagaactggtatgtaatctggatgcactttcaaatattccgccgcctgctcaactgtcatcgcttcgtctttcgtggctttgactgcccgctgaagctcaacttgtaaaggaatcatttcgcatcaccttctttcccaagcgaatcccaatcaaacgtttcaagaatcttaagcaaccgttcaacttttggtgctctccaagctgtcatagcgtacgtatgagcttctgaagtgtaatggtgcttgttcaatttgatgtggctctttgcttctgcttttgtcaaaaacattgtatttggttgtataatgtgaacctttctttctggaattaattctgcttcttcatcaatgtatttttgaatccactcaacagcatcttcatagtcgtcctcaatttcttgcaactctgttaaggcttccttagacagctcactatcttcttttatttcttctagataatcatcaaaaacataggcttctgcaatatatggcaggtatacagaataacgctctgcgttttcctcccgagcttcaacccattcataatcaccgactgtccaaaaccgtggtgcagcttgagaatcacgatcctgtgttttcaattcattttgaagctctttcaaaaattgaatatccttgttcatttcacatcaccctccaattcattttgggcaactgttatcgcgaaattgagattggtaatgatcttctctaatgcctgtttgtatcgtttcctatccccgcttaaatgctgaatgtccttttgagcctgccggaattgatgaaccgttacttcctgctggcgtttgttttcctcgatgatttcccgctgtttttctactgattgaattagaaattcttgatcctcaagaatagtggaccaattaacatcaattttctttttataaagtgaagttgctattgaaaatctattttttatttcctgtaatttatccatgccgttcctcccccgcaggggaaagcccctgctatttgattttgaaacctatttcgtgatcgactcgagcaaagcttccctttgccgtttgaatgattgttttgccatgctccggggcttccaagacatgtgcggtgccctggctcccgtctaaaacgatgatctgtattttgcccgactccattgcctgttcgattgttgtatctttgcttaaattaatttctcttgggttgtacattcttagcgccccctgtgctatgatagaagtaccagttcatatcagagcatcggggcatacgcttcggtgctttttttgtgtttaatagtgatccggtttccatccagtcattgtgaatgttggcgatggtttcagatcctcacggtaaacgatcgggtgttttttcacgtattcggccagctgttccggcgtcatcttccattcttcaaccggtcctggcaggtaaggattgatgctttgctgttccatggtatctacctcctgaattgattttgggaatttccgtgccgccgagcttcttgcaatcagaacccattcggctggcgcatgccttaaactgagagcaacgtgtcatacaggccatgagcttatcttcttcctgcacccacaacggccgatcgtctgcgattaccacgtttagcagtggactttcccgcctttcttttgagttttttcagctcgtccagctcgatgaagccgagtgacttatccagagccagcaccttgagtggcgtatcgtaaagccgctcatacagcttgcgcttgatggcaaattcctttgtttcaacgcccttgatgtcaatgatctcgatgctgccgtccaagttatgaacctcaaagtctgcaatatattcaatcttccgaaaagttttgccgttctttttgaatgcctcttgcagcaggaaccgtggctgcagcttaaaatctttgatctgcttgctcaccttgagccatttcagctgctcatagtatttggcttcggcccggctgtcgaacgtgatgccgtctacctgtgtttttcttgcgccgtacttatttgctggcatgtgatgcctcctgaaacttattcttttgttctgcaatctccatttctgacatgccgcagtcaatacaacattcatagtcaggtatttgcaaatgaccttctcccggcatagtgcagtaactcatttccatgtgtttatgttcacaggattcctgacgttttttctgttcagcctctttgacaaccgagcagtattctctttcgtgcaacctagcaccgtgctttgtcatcagccgctttccgcaatgttcacactggtaaagcgtctgattttctaacactttcattctccttacctcccgtcactctcttcccattgctgaatctgcttttcttttgctggcgccgttagtatgattgccggcagcagcatcaccgctttaagcactcggcatcagctccatttgtctgatcttttcctcaagcacctggatagctggtgtgaggtccttgccgcccttttgttcagcaggcccgaacaaatacattcctttggatcctataacgttcgttttctcgttcaatcccaatcacccaatctatgatttaattccatccggttgccctgaatgatcaccgtgtaatacttgcacatctggtaaatccgagagcccagcgcctcgtcaacgtccagcagatcgtccgttgtgagctcagaagagatcagcagaggtttatggttcaggtagcgataattcacaactgactggatctgttcgacttgccattcagttgcccttggcttcccgtcaactggcttgaataagtcatcaatgaacagcacatctgcttttctcatggcgttcagctttgtttccagctggtcaaagtcatttttcagatcactcatgccctcaacgtaagggaagtacaggcagtgagttgatttcttcttaatgagattgttcatgatggccgttaacagatgggttttgccgctgcccggctgtcccagcagagcaatgctattggcacgctctcccttgatcttttcaaagtctttgaagtattcgaccgcacattcataggcatctttaatcatttgaggtttgccatctaatttgaagttgccaaacaacagcttttcgaacttttctgtaatgccgctggctgccatgagcttcgctattttcttttgtttcacacactcacattgtttggaatacgtcgttttccattcccgagccttatccggcgtgcaaacctttcctgcaaggtaatcatcttcaagaaccatttcatcaagtgataggctgtccaatggcttgtgttcttttctcaaccgcagctcagtgtctttgtggatgcggtagatcacaacgccgcgatccttgcactcagagcattcatattcaaccttttcttctgattcggcctgttctgtttcccaggaacgcgatcttgcttgaagacccttcatcattgcttggaacgctgtgtctatactgactgctttgtttattgccatactgttgtttctcctttctcttttggcttaatgggttggacaggatcgcctcaatgtagttcaagccaacgttgctgcctttatttctgaaagcctttttcattgcctcgatgaccttctcttcgccgtaatcatccaccatgtagccgattctttgcgcctcaatggagccgatagaacgagcgaccttattttcgaatagctcaaaagcgtttttcatttttggatcaacctcctgcgtttcttgtggtgctggtgcaagttcaggaacaggcttttcagatggttcctgctccgttacaggcgtttcaaatgagatcagcctgtattgccctgccttcctcccctgcggcttatattcaattcttttaagatcaatcagcatctttcggtgtttgatcaacgtattttcggaaatctcaatctttgcttgcagagtggtatttgaagtggtgaaccactctcgccaccctgccttattgttgatgtgcaaaagatgaaaccataatgcttgagttgtagcagacaacggattcgtttctagccaattcatgaagccgttcatttctttcaggtagttcatggctcacctacttcctttcacacagtgctgtcattccgctgatacggactaaacgtaagccaggttcatttgttctgagatagccttcaacataagcacggaacagctgcgcgcgatttggcgccccttccgtcagccatttgtaacagaaggggatgccgactttaatcaaatgggaggtcatcttcgctgatgtctacaggcttgccgtcaaaaggatcagcgtcctgcgcgcttggtttttcctcagatggttcggcatcaatgatttctggctcagacatttcgtcagtgatgtcaatgcgctctcgttcctcgttatcctcaataactgccttttgcatttcaacagagagtatcccccacttgctgagcatggattttagaacggttttgagtgccatcgcatcccagtccttgccccaaccgaagtccgacttgctaaatttctttttgtgtttctcaacttgcgcctttgtccaatagacagtttttcggaatccatttaaaagctcaaaataagcagcgtaaccaataaccgaatctgattcccgcttttcaaaatcaatatcaatttcctcggtcaacggattccacttttgcaattctccttcatgaaccggtatgcaattgatagatttatattggcccgtccgcaaagcaagctgaatgtatcctttgtaaccaagctgaaattgcgcacggcctttatacggaacgatccaggcataacctaagttcttatccactggcaaatcgagcgttgccgccaccatagccgatgaaattacactcatagggtctgccttttgaagcgtattttcactgttgtacaggctcagaattgacgctgtgaattgagacgctctttttcccagaacttcttcgaatcgattcatgactgctggagaagaaagcaggcccttcatcgttgttccctgctgttgtcctggggcactgttttgtttcttctgaatgctgtttttaagcgtttgatttgtagccatattcagctaacctccttaattccaaagcgcctgaattgcacttcttttgtgactttctcgtatacatctggaaactgctctttcaatttcttgctatcgatccgattagttgaaactgacttccagctagtttgatagtttccgatgaatccatattctgcttccttcatttcatgtttgatctggttttctaattcctttgcctgcaatgacagctcgttgatctgctctttcagctgtaaatactgctgaatacgtgttttattatcagatgtgagatcaacgactttgccgccttctgcttcggcataacgttgcttgagatattcttctgcagcactcgaaccgtcaagaaccggagcctttccgcccaagaccttttcattccaaaattcaatttcggcctgaaagatcattgcaataagctcgtcatcgcgctcaatctctttccaaacgaatttattgccgccgatcagtacagcaaaatatgcttttttatattcaggccccagcactcctagatagtgttggacctgaacaatatagctgtcaggaatctcgtcatcttcccactctttcaggttgtatgccgatgtggttttgcactccaaaatggctttttcgccaacaatcattcgatcaacgtttgccaatataaaaccgtgcttaggatgcctgagcattgcttttctccgccttacttttttgccgctacgtatctcaaactcttttgcaacgatatcttcaaggagtgaaccgaagtaggctgcctcacttcctgattcactcacaggtacttgacctgttttgtctaaccataattcaaacggtgttcgccatttgtttatgcctaaaattacagaagcatctgaaccgccgatgcctttccgtcgctcaagaagccattcgtcccgactcatgtccgctgtcgaagcgaaaacctctgcttgcatcagagcagccccacctttcttttgtaagcttccgcaccaagccgctgccattcccggtagtgatccattgaaggaaaactaaactgcgctttaccgtttttggcgaatacaattgaaccgccgacctgtctcaaacgttgctgatcctccgcacgctcgctgaacgccactttaactgctttagccatgtataaaacctccattgattttcttgaggctatctggtagaatattgatatatgagttttcagatagcctttaattaagtccactctgccaagtgggcttttttattgctcatttttaaattcaaaaccaagatgctcctttaagtaccgctcaaggttttccctcaagatgacttcaccctcagcgctatctatcacgtaatcgtcgaaaggcgttacttcatccccgaaaaaatcctttggtgtttctggctcagtcagcttgtcgtgccaattgtttagaatcatcgggttttcgatcgtcattcatattctcctttctgtaattagctatgcgttcatcccaaatcagataaagttcgctatgatttcggattctttcacaccatgctctgacctccaacgctgtcgctggtttatgaacaaagtgaaccatcatcctaagctcctgcgtaccactgataaatcaattccacgctgtttcagcctcatcgctgcatcatataagcatcccttatttgaaatccgtttaagatcctcaatgtttgctttgatactgccaaggatgtctaaagcttcctcgtagtcgccttctttcaaagagtccagtaatagttcagccaaactttcaactgaatctgatttccgttttacgacttcttcatctgacttcaaaaaatggttgagtttcatacgagcatcgccttcctttcctcttgttttgacatagcaacttgatccattaacgctttccgcgtccatttgtctgcaagctcctgcattttcagaccatgacttcgagataaagcataaaagagagtgtctacagctggaccaaggtcaagaatctctttaagatccgccatcggtagcgcctcaatacggccggggcgttcattcgccaaccagagcgcgatattttcagcagcctcaagggattcctttgtctgtttcataaaattgatcagggctttactggggctgacgttcaacgccggatcgactggggctgttgccctcggatgaagccggaacaagtaatgtacaaggtcaatgtgctcataagcgccgcatatctcaaaccatttgatgcaaagttcaggcgttagtgtggtcaggccattttcaacgtctgatacataccgttgatctttgccgccaagtaactgccctaattgaaattgagtaaatcccattgtctttctaacctctctcataatttttggtaaattatcgagtttatacgggttgttcgacatatgttcgcctcctgtttcacggggaattatttggtaaaatttaagtaatgaaggaactagctggcttgctgttttttcagcttattgatgatgaaggcttgtcccttcggagtgatgcgcattgtcagccaggatttcggcgtcccgtttacttggcgcaccccctgtgcgatctcaaagaaacctcgctcgatgtattcctggtatggctcattcttgttggccatgatcatcttccattcgcgcagcttctgaaacagtcgcttttcaccaatcatgatgccgtttttcgaagcaagctttgccagttctctcacaagcaatgatttttcggccgccatgcaactctgtgcaaagttgaccaatggttcctgaatcttcaatgcttgttcaagttgctgccgttcttcctgctcgctgatccatcgctttgcccggctgactggatcttcgatcatgtaggacggttgagtcattttttgaagctcggcttccatccggttaaattcagcaatgtatttttctttgaacactgctgcttttgcacccgtataaccaaaaaccaaaaatgcgagtccatcacgtttgatcagatattttttcaatgatcgtcctgttggatcttcatattcactcaacgaaaaatttcgttcagtaaaatctttagagcaattcagtgtttcaatgctttttattacatcggcgtgtcgttttccgaatacctcagccactgttaggctgtctgttacggcttggttgccttcaataaaaacaatttgattcatgctgttacctccttgcttgtccaccaaaaaaaggtgaagcagataattaagcgtgaagccttaattcttttttagaagtgaagtacggctcaagagctttacggaaacactcttctctgtccatcgttccgtaatattctttgcccatcttgatgtttgttgtttttttcttagtttgtttcgccatgtgatcacctcacgtcagtgtattcgtgttggacggttggactaaccaagaaattaagcagattcaagatccccattcttcatttcgtggcattcttcttcaaaaaaaagagtccaatcaaaatctaaaatgtttgcgatcttttttgcgacatgaggtctgacattcctttcgccagtctcaatggcaccataagttgatcttgcaatgccaactttgatggcaagttgttcttgcgttaaattggcatcttcacgtttttttctgagccagtatttcaattaggatgcctcctttcgttctacatatcgtggcttatgaatacatattaaaccacgatatgtagaatgtcaaacctttttattaaaaaacacgtaatattttcttcatttcgtggcatgtcgtttaattccacaaaatgtagagttataatgaatttagaatttacctttaaaagttagtaggtgatattatggcgattaaacataggctagtcgaattgaggaaaaagcaagggcctcatgtgaagcaagaagatgtggctaaagctttaggtatagcacgctccacttacggtgcttatgaacaagggaaacgcgaaccggaccacgctactctaataaagatagctgattattatggagtgactatagattacctactaagagatgagccagagaatatgaaaaatgaaatcttcaacgaacaagcaagaaagattcttgaagatcctgatactctggtagctgctgctgatggaaagataacagcttcaattttagaggcagctcaaagaattattgctgagcaattaaaatcaggtagacaacccggagatataaaaaacgggaacaaaaaataattacataacgatcgctttatctttatttattattattgtttagtttagtttagtttaattaatgctgaacacttcgcctcaaaatttgaggtaaactattcagttgaaaccatttcaacctcaatttttgaggtgatccatgaggttatttctgcattcaaccgcaaattttgaggtaaaacattcagggtttttcactcagattttagagagaaaaagtaaaaaaatcctttatttagacgatacaaagaaagagattgcacttcattataaaaggggaaattacaattgaaaaaatggttattaggtattggagcattgactcttagtttttctttagctgcatgtagttctgactcttcaagtagtaatgaaaaatcttcttcaagcaagacaagctcacttagtgctgaggaccagtttaaaaaagatgcaaaatcatatgcctatgaaaaagtaaatagcgccggcattaagaaagggacaaaaattgtcattgaaggcgatgttacttatgcagataacgtcaatgatgatggggatacagtttctaaaaatgttgagtttactgtaagtaaaaatagcgatggatctgaagtttacacagtaagcaataaaagcgctgataagttcaaactaaacgatacggttaaaatttatggtacatatgaaggcagagctgaaggaagtgcccttcctaaagtgaaagccgtttacgtcgataaaattgataaagaaaaagagcaagctaaacaagatgctgcactaaaagaacagtttgaaaaaactggcgaaggtgatattgaaggactgggccacgttaaagatatcggcgttggatataacgacgaagtcggaattgacggtaaagacactcctataaaacctgttacgatgggcagcatgaagctttatattaacagtgtcgacgttctcgaaattcaaccagatgatgatgcaaaatcactttattttaatgatcaagataaggttcgggctattgttgtcgatatgaaggccgaaaacacttcttctaaggacgtaacgtttgaccctaaccaagctgttattgttacaaatacaggagaacagcttgaatctgaaatgggattaatgggtgaagtaggcggagacttcttagggaaagttaaaaaagaaggccaggcatggtggatacttaaagataattcaaaagatatcactagtttgaaaatgattatttctcctccaagtgatgcaaaaacctatgatgatttaggaagcgagaaaagactagattttgatatcttgagttttgaagaagctaagaaaaaagattcaaattaaattgagcccctaaagggggcttttcttttcgctaaaaagagaacatacgtttgttcgccttcgacaaaataggtgataagatacaataaagcccatgataaaagtcacatctttggttatttaagggaggtttcatctttgagatacactaacagccatttagaagattggattgaacagctttacagggagatcaatattacaaagccacatgagattaattttgatagaattgctcaggccttggacatcttaattgtttacaatccggaaacgagttttgctctgcgattcaacggcatgtatacaatttctttagattcacgaaagacacgacaggaacagtggctggattttgctcatgaggtttgccatgattttagacacatgaacgatgataagatcatgcccgcttcgtggaaacgttatttagagtaccaggccaattattttgcttatcacttttgtatacctactttcatgctccgagcaatggacatcccccgtaatctatacgacgcagttcaagtcattgccgatgccttcaaggttccagagtcatttgcgatgacccgcatcaatatgtacttcaataaaaaacgactcatcatataaaaaagagcctctaaagggctctaagtttgcgaccggtatgcataccatttgaaatatggtttcgaacggttttctcactgataaatagctcgcttgcaatctcctttgttgtcttatcttgaacgagcaattcgaacacttctctttctcttttcgttagcagcggcttcgattgaaattctttctccttcaagtattgtaaccctccttgctaaggtgagagcgaatcagaaacgaatgggttttgatatagtcgagatatcatatgtaagaagggcgcaggaggtgacgtttacaagataattagtttatcgtgtatgaagaagcgtttctttctcctcatctgtccagctgacagctttgccgctttcctttgagacttgaaccatcacgactgccccggtgaagcagggttcgccttcgaggttctctccgagatagtgcaaggtaagagatgaactgccgactgcgcttgttttcacatagatgcgcaactcttcataaggcatgacttggcgcaaataatcgcattgctggcttgccacgactgtcatggtctgtttgttttcactcatcatattcagctttttaaaataagaaatccgcgcctcctcaaaatatataaaaggggttacattattcatatgcccaaacatgtctgtctcggaaaatcttacggatacctcattgaaaaaagaaaaggatgttttccattcttgaaacggcatatcaatataagcgggaagcttcatcttttttcatctccttattgtttaaaaaaacctctcccatgcggaagaggttttttcttcttatactctgtcgcttccgaagaaattgcggaacgcttgtaagtttgtatctctattcaaggctgcaatcgaagtggtaagcggaatccccttcggacaggattgaacacagttttgcgagttaccgcaatctgcaaggccgccttcatccattaatgcttctaatcgttcagatttattcatggcgcctgtcggatgcgcgttaaacaggcggacttgcgacatcggtgcaggccccatgaacttcgatttgctgttcacattcgggcaagcttcgaggcagacgccgcatgtcatgcattttgataattcatatgcccattgacggcgtttttctggcattctcggccccggtcctaaatcgtacgtaccatcaatcggtatccatgctttaacttttttcaatgaatcaaacattctgctgcgatcaacctgcaaatcacgaacgactgggaatgttttcattggttttaaacggatcggctgttcaagctggtcaataagcgccgtgcaagactggcggggttttccgtttatgaccattgaacatgcgccgcatacttcctcaagacagttcatatcccatgtgacaggggttgtcttctcacctttgacattaaccggattccggcggatttccatcagagcggaaatgacgttcagattcgggcggtatggaatctcaaattcttcatcataaggcgtgctgtcagctgtatcttgacgtgtgataataaatcgtatggttttttgttcactcatgattatttcgccaccttcttcttcgagtaatcccgtttccgaggcgttatcagtgatacatcgacatcctgatactcaaattccggcgcttcatacgggcttacatgtttagccattgttgttttgagccattcatcatcattacgttcaggataatccggtttataatgggcgccccggctttcattacggttgtatgcgccaagggtaatcaccctagcaagctgaagcatgtttgagaactggcgtgtgaacatcgctccctggttgctccattttgtcgtgtcattgatgttgatctttttgaagcgctccattaactcctgaattttgtcatccgttttcaaaagcttgtcattatggcggacaaccgttacgttcgccgtcatccactcaccgagctctttgtgaagaacataggcattttcggttccgtccatactcataatatcagcccatttttcttcttctttcttaacgtgagcgtcgaataaagatgaagacatgtcttccgctgaagattctaagccgtttacatatttcaccgcattcggaccggccaccatgcctccgtaaatcgcagacagcagggagttcgctcccaagcggttgccgccgtgcatagaataatcacattccccagccgcaaacagtccagggatgtttgtcatttgatcgtaatctacccataaaccgcccatagaataatggaccgccgggaagattttcattgggagcttacgcgggtcgtctcccatgaatttctcataaatctcaatgatgccgccaagcttaatatcaagctctttcggatctttatgagacagatcgagatataccatgttttcaccgttaatgccgagcttctggttcacacacacatcaaatatttcgcgtgtcgcaatatcacgcggcaccaggtttccgtatgccggatatttttcctccaggaaataccatggtttgccgtctttatatgtccacacgcgcccgccttcaccacgcgctgattcactcatcagtcttaatttgtcatcgcccggtatggctgtcgggtggatttgaatgaattctccgtttgcataatacgctccctgctgataaacgattgatgcagcagatcctgtattaatcatggagttcgttgattttccaaagatgattcccggtccgcccgtcgccataatgacagcgtctgaacggaaggattcaatttgcatgtttgtcaggttttgtgcaacaattccacggcaggttctgtcatcatctaaaacagcgccaaggaattcccagccttcgtattttgtgaccagacccgcaacttcgtatctgcgcacttgctcgtccagtgcgtaaagcagctgctgtcccgtcgtcgcaccagcataagcagttctgtggtgctgtgtacccccgaatcggcggaaatcaagcaggccttcaggcgtccggttaaacatgacgcccatccggtctaataagtggatgattgaaggcgccgcttcacacatcgccttgaccggcggctggttggcaagaaagtctcccccgtataccgtgtcatcaaaatgttcccacggagagtcaccttccccttttgtattgaccgctccgtttatgccgccttgcgcacaaaccgaatgagaacgtttgacaggaacgatggaaaacaacttaaccgccattcctgattccgctgctttaattgtcgccatgaggccggcaagacccccgccgactacgataatgcttgattgactcatgatagcccctctccctctagtaatctagtactcttaaacaaatgcgaaaatcgcttttaagcctacgtatgacagtgcaacaaaaataatcagcgtaacgtatgtcgaaattctttgagaacgaggcgttaccgtgatgccccatgtaacagcgaaagaccataaaccgttcgagaagtggaaaattgttgataaaacaccgacaatgtaaaaaccaagcatagccggagagctcaaaatattcgccatcatgtcgaaattgacctcagcgcccatttgtgcggcaatgcgggtttcccacacgtgccagctgacgaaaatgagggtgatgataccggttacacgctgcaggacgaatagccagtttctcatgtagctgtattgacctgcgttatttttcgcagtaaacgctatgtacacaccataaactgcatgataaattaatggtaagaagataataaaaatttccaaggcatacctgaaaggcagactatccataaaatgagcagcgctattgaatgcttcagcgccccttgcggcaaactggttgacgactaaatgctgaataagaaagatgccgaccggtatgacgccaagcaaggaatgcaatcttcgaaaataaaactctctgttcccagacattactttaccccctgtttgataagtgcgaaatgtgctaaatctcttcccccacttctttcaattgtaagcactttattaagatttattgacaatttcattttactcctccctcaaaagggcgtcaagaaaacgcgtacataaattataattttccgaattggttagttgattgaaaaattttattttatcaatatatatttcttacttaatttttcataagaattacaggatcattctgtaatcctcccccctgtttgagctataatatacgcaggagagaggggagacagatatgaagtctaaatttgaagcatctattgacaacctaaaagaaattgaaatgaacgcctatgcctacgaactaatacgagagatcgttctcccagatatgcttggccaagattactcttccatgatgtattgggcaggaaaacatctcgcccgtaagtttcctcttgaatcatgggaggaatttccggccttctttgaagaagcgggctggggaaccctcaccaacgtaagcgctaaaaaacaggagcttgaatttgaacttgaagggccgatcatttccaaccggcttaaacatcagaaagaaccttgctttcagctggaggctggttttatcgctgaacaaattcaattgatgaatgatcagattgccgaatcatatgaacaagtgaaaaagagagcggataaagtggttctgactgtgaaatgggatatgaaagacccagtgtaatcaaaaaggcggtgactgcatagtcccgcctttttgattgtcattacacagctgaagggtgttttgaaagctcaaatgcatcgtgaagcgactcgactgctttcaccatgtcattttcgcttacgactgttgacactttgatttcagatgtgctgaccattttgattaaaatgtttttttgcgccagtacagcaaacatttcagccgctacaccgggatttgagaccatgccggatccaacaatggatactttagccaatttgctttctgtctcgattttctcaaattccagcgcgtctttatactcttcaagcaccgcaacggtttggtctgcatcttctgttttgacagagaaggaaattccagtcttgtcctcggcctgcgtttggataatgatatccacgtttatgtttcttttggcaagtgtcgtaaaaatagtagacaaagttgtcaagccgctagtcagcccgtaaatggttactcttgtgatttgatcttcaaatgcaatgcctctgacaattaaattctgttccatggatgattcctcctcaattaatgttcccgcttcggtttctgtacttgaacgcacttctaacggcacttggtaatttttcgcgaactcaactgctctcggatgaagaacgccggcgcctaaattggcaagctcaagcatttcatcgtatgagatgcccgcaagttttctcgctgatttcacatagcgcggatcggttgtaaacacacctggcacgtctgtgtatatgtcacatttatcagcttttaaagcggcagccaaagcaactgctgttgtatctgaaccgccccggcccaatgtcgtaatttcacaatcctctgtcattccttggaagcctgcaacaatgacaatttttcctttttcaagctggtctgctaaaaccgaagtgtcgatatctgtaattctggcgtttccgtgaatggcctccgtacggattcccgcctgccagccagtataagacacagcgtcatagcctttttcctgcaatgccattgaaaggagtgaaatcgtgacctgctcgcctgtcgccagcagcatatccatttcgcgtttgctcggctggtcagaaatagcttttgcaaggctgaccaattcgtcagtggattttcccattgctgaaacgacgacaacgacttgatggcctttctgtttttctgcaattgcgcggtttgccgcattttgaattttttcgactgagccgacggaagtgcctccgaatttttgtacaataagacccatgtattaccaccctttacattttggttcgtgcgggtgaggagaaagagcgctttgtccacaataaaaaaagcaatgagaggaatactctcattgcttatcaattaatcatcataaatgattatgaacaacgagatagccctccaagaaaatgatttcttgacagccttacatttattcaatgcacggccagcaaataataccgatggggttttatttgcttcggcgacgctcccctttcagcctttttcacagaatccatctttctccaaaggcatactcttgaagttcgcacctctatcttcaccatataacacgatctaactatgaaattagttcacattttatcagatcttatttaaaaggacaacattatttttgcaatttgtcgtaaaggagctgagccgccgctgcgggaacaccggcttttttgatgtcctcaaggcttgcttccttcatttttttaacggaaccgaaatgctttaacagcattttctttcttttctctccgatacccgggatgtcgtccaaaacggattgaaacgcgctttttccgcggatttgcctgtgaaaactgattgcaaaacggtgcacctcgtcctgaatgcgctgcaggaggtaaaattcctggctgtttcgttccagatacaccacctccagcggatcaccgatcagtaaatttgaggttctgtgtttttcatctttcgctaaaccggcgatcgggatatccaagccgagttcattttcaatgacatcccttgctgcgttgatctgcccttttcctccgtcaatgataatcagatcgggcagcggcagattctcacgaagcactctcgtatagcgtcttctgacaacctctctcatagaaccgtaatcatccggccctgtaacagttttgattttatatttgcggtattcctttttgtatggtttgccatcgataaacacaatcatcgcggaaaccgggtttgtcccctgtatatttgagttatcaaacgcttcaattctgtgcggcgtataaatatttaatgcctcacctagtttctgcactgccccgattgaacgctcctcgtcccgttcgattaaagagaatttttctttcaatgcgattttcgcatttttatgggcaagcatgagcagttcttttttcgggccttttttcggctggtgaacgtttgtttccagcagctgctcgatcatagattgatctacgctgtccggaactaaaatctccttcggaaggaagtggttgttttttgaatagaactgcccgatgaacgtgaggaactcttcatctgcttcctgataaagcgggaacatgctgacatcgcgttcaatgagctttccttggcggatgaaaaagacctgcacgcacatccagcccttatcgtacgcgtacgcgaacacatcacggtcgactagatcgttcatcgtcattttttgtttttccatcgttgattcaatatgggccatttggtcacgaagctcttttgctcgttcaaactcaagattctcagcagcttcatgcattttctcttcaagctcttttttgacctcattatagccgccccttaagaaacgtgtaatgctttcaaccagctctctgttcgtctcttcggaaatatcctttacacacggagcgaggcattggcccagatgatagtaaaggcacactctgtccgggagcttggagcattttctgagaggatacagacggtcgagcagtttttttgtttcccttgctgcctgtacattcggatacggcccgaaatagcgccctttgtcttttttgacattgcgggtgacaatcagccttgggtggcgttcatgggtgagttttatgaaaggataggttttgtcgtctttgagcatgacgttgtatttcggatcatgctttttgatcagattcatttctaaaataagcgcttcaagattggaggacgtcacgatatattcaaaatcctcgatttccgtcacaagcctttgggttttcgcgtcgtgagaaccggtgaagtaggagcgcactctgtttttcagcacttttgctttccctacgtagatcacagtctgctgccggtccttcatgagataacaacccggttgatcaggaaggagggcgagtttttctttcagttgtttgttcatatgttacccttccttatgtttaatcctttatttccagtttaacacgaacgtttgtttttctctatggttcacaattggcgaataaaaaaagcgatccctcaatcggaatcgctctggcatgtaagcagcggaaaattaaagatgtttgtttacaagctcttgaagcgcttcttttggtttgaagccgactgaagtttcaactacttcgccgtcttttaacacaagaagagtcgggatgctcataacgccgtattttccggcagtttcttggttttcgtctacatcgatttttacgattttcagtttgtctcccatttcttgatccaattcttcaagaacaggtgcaatcattttacaaggtccgcaccaaggagcccagaagtctgccagtacgacgccttcgcttgtttcagctgagaaagattgatcagttgcttttacgatagccattattgaattcctccaatgtgaaatgatgatttttagtatagcatctcccattcgttcacgctattttaatgcttacaaattattttttcctgatcacagccggtttactcatttttatatggttgaatgggatatgctctttttttaaaacacaaatctgataatggccccaatcactacaattgccccaataatcattaaaatggtacgaagcataagatcacatctcctcttcactgtcatgtactttaccatgccctgccggagctgttttaaaacctgaaaaagagcgccggcatgaagctccggcgctcttgcgcgattaagaatcagcacgcagcgtaagcaagacgactgacattggcgggagttttactttcagtttgtttttgctgagcgtgtattgcctgaaggattccggtttgacatgatgaggatcgtcaaacgtgttatgcgcattcattttttctgccgtaagaatgactccggaatggtccgctgccttgtgtaggcccctcagctcgatttccgcctccgctttgttttggtgatcgatgttgcaaattgtgatattgatatcgccttcagtttgtttcgacgctgaaatgctgatttgcggaagcgtttcaccgttccattcatagtcggcagacattgtctctgtggctaaaagagaagcgtcctggtgcaccttaaacatattgaatacatggtacgtcggtgtcaaaagcatccgctctccctcagtcaaaatcatcgcttgaagaacatttactgtttgggcgatgttggccatttgcacccggcggcaatgctgatggaaaatgtggaaatgagaagccgccaccagtgcatcacgaatggtgttttgctgatataagaaaccgggattcgtgcctggctcgggatcaaaccacgtgccccattcatcaataatcagcccgacccgctgctccggatcgtaccggtccataatcgtgccgtgtttttgaatcaattcatcgatgtatttggcttttttcatcgtaataaaccattcatcttccgtgaattctgtggctgatcctttgcccttccagaaatcccccggaatcgtgtaataatgaagactcaacccgtccatcaggccagcggcttttttcataagcacgtccgtccaattaaaatcatccacatttgcgccgcctgcaattttataaatgtcattcccgctgtaattgcggacataagtctgaaaacgccggtacagatctgcgtagtattcgggatgcatgttgccgccgcagccccagttttcattgcccacgccgaaatatttcagcttccaaggctcttctcttccattttgctttctccagtctgacatcggcgtgccttcttcaaatgtcatatactcaatccactccgccatttcctgaacggttccgcttccgacattgccgcaaatatatggctcgcattcaagcagctcgcaaagcatcataaattcatgcgttccgaattcatttgattcaattgtaccgccccagtgagtgttcagcattgtcttacggtcaccgacaccgtttgcccaatggtattcgtccgcaaaacacccgcctggccacctgaggacagggatgtgcagctgtttgagcgcctccagcacgtcctttcgtatcccgttgatattggggatgtctgagtccgttccgacccagatcccctcataaatccctcttcctaaatgctcagcaaaatgaccgtatatatttttgttaattgttccttttacgatatctgtttgaatcactgcttgatgttcagacatgcctctgatcattcctttcatacggatatgaaaagcaccacagtcaaatatgtgatctgtcttttgcctgaggagtcagcatgaatgtaagcgcttttaaagtaaccatattatatatgttcgtacatgtcaacgacattttctattgtttttatatttgtacgtatgtatttataaatatgaaaaaatcccgaacttttaaagtccgggatttcctttatgagtgtatattcaattgtttgaattcctcagttaataacgggacaacttcaaataaatcaccgacgatgccgtaatccgctattttaaagatatcggcttcggggtctttattgatggcgacgatcaccttgctgtttgacatgccggccaaatgctggatggcgccggaaatgccgcatgcaatgtacaaatccggagtgacgactttcccggtctgcccgatttggagagcgtaatcgcaataatcagcgtcacatgccccgcgagaagccccgactgcggcccctagcacctctgcaagctcctgcagaggctgaaatccctccttgcttttgactcctcggccgcccgcaacgataatttttgcttcggagagatcaacgccgtcagctgtttttttcacgacctcttggataacagtgcggaggtcagtaagagaaacatcaatgcttttgatgctccccgatctgctggtgtctttttctgaagcttgaatgttattggggcgaattgttgcaaagatcatcggatcggttgaaatgacgcgttcaaaagctttccccgagtaaatcggccgtgtgaacacaacattccctccggtaacgcttacatctatagcatcagaaattaagcctgtttgcagccgggcagcaagcttcggtgaaagatccttgcccattgccgtatgcccgaagatgactgaatcaggattttcttgctcgataacacctctcatgacctggctgtacccgtctgccgtgtatgttttcagcttcgggtcctcagcggtaagaactttatctgctccgtaatgaataagctcttgtgcaatgctttgtacattttcaccgatgagaacaccgatgacttccccatctcctgaaatggttcttcctgcagctattgcttcaaaggtgacattccgcaattccccatcgcgtatttctccaagcacgatcactttttttcccattctaacatccccctgtttctttgaatgtccaagctttaaatgactttagcttcgctgcggagcaatgaaacaagctcttttgcctgttcagcaggctcaccttggagaagcttcccggcttcttttttcggcggcagaaaacgttcaatggttttcagctttggttcagcatcctcttcgtccaggtcaagatcatcaagttcaagctcttcaagcggctttttcttagccttcataattcccggaagcgatggatagcgcggctcgtttaagccctgctgagctgtgacaagcaatgggagcgtcgttttgattttttcaacatccccttcgacgtccctttctgcttctgcatcagtgccgttgatttcgagtttggtgatcgtagtgatacacggaatgtccagcagctcggcaagccgaggcgccacttgtcctgatcctccgtcaatggcaacatttccgccgagaatcaaatcaaactcctgatccttcatatagtggtataaaacttgagaaatggaatattggtcgggttcatcaagatcatcttctatgttgattaaaacagcttggtcacaacccatggcaagcgccgtacgcaattctttctccgcttcttcaccgccgaccgtgacagcggtgatcgtgccgccatgcttttccttcagctggatggcttcttctatcgcgtactcatcatatggattaatgatccattccgctccgtcatcctgaatctttcctgtttcaatgacgattttttcttctgtgtcaaacgtccgtttcatcagtacaaatagattcatgatcatatccccttttattcgcctttgaactgaggctttcttttttcgagaaatgcctggatgccttccttggcgtcctctgactcaaatgcttccccaaatcgctttgcttcaagctttaagctgccttcataggaatacaccttgttggaataaagaagttcaagcaaagatgccagcgtttgcgggcttttctctgcaaacttagcggcaagtgcttttgctttttcaatcacttctgcctcatctttcgctccaattgaaacaagtccgagatcaagcgcttcttttccggatatcggttctcctgatccgatgagctccagtgctttggctgtaccgacatatctcggaaggcgctgtgtccccgcaaaacctggaatgataccgagattaagctccgggagccccagcttagcatcttctgccgcgattctgatgtgacaggccattgcaagctccagcccgcctccgagagcagcgccgtgaatcgctgcgataatcggttttggaaaactttcgattctctccattaactgctggccgcgctcagcgagcaatgaggaatcctcattgcctttaagcgatgtaaattctttaatatcagcgccggctgagaaaaatcttccctcgccgtgaatgataatgcttcgtacgcctgcatctgtctcacattgatcaagacaggaagacagctcttctaatatccggcttgaaagcgcgtttgccggcggattgtgaatcgtcaagactgccacaaattgatcaaccgcaagtgaaattgcattcataggacagaactcctttacttattgtgaattccggataccaataattctaaaacgctgtttgaaagcgcaacgagatcgtacttttggtcattcatcacccaagttgtcacagtttcgtcaatcgttccaaaaatcatctgccgggcgaggcggacatcgaggccttcttttatttcgcctgattgtataccttccgtcaaaatgccatccaaaatatttaagtagccttttaatatttcgttgattttttggcgcagctccaagttggattggcggagctcaagctgcgtgacaatcgcgagattatggtcacccgctaaaagggaaaaatgctttgaaatcacaagcgccaatttctctttcgctgttgctttttctttaatgtcctcttccatccgctcaataaattgacccattttttctttgaaaagagaaattaaaatatcttctttgtttttaaaatagagatagatggtgccgtccgctactccggcttgtttggcaattttggatacctgtgactggtggtagccgttttctgcaatgacttctactgctgcatcaataatctgcatatactttggccgtttttgcttcaatgttcatcgttccttcctacagaaatgaatgactattcattcataatttcatgataagaaggattttcaggtttgtcaagtttattcataggcgttctctttttttatttgatatgatgattttcggtttcttcttcaagtaaacgccttcttaaaatttttcccaccgccgttttcggcagctcttttctgaactcataggctttgggcaccttatagggagctagtcgagatctcgcaaaggcatccagttcttctgcatcggcttttgcgcctttctttaatacgacaaatgcttttactgtttctcccctgtaggaatcgggaacgcctgcaacaacaatttcctggatggcttcatgttcataaagcgcttcttctacctcacgcgggtaaatattgtaaccgccggcaatgatgatatccttcttcctgtcagcaatatagaaaaagccttcttcatccatatagcccatgtccccggtgaacagccaaccatctctcagcactgcggcggtttcctctggtttattccagtatcctttcatgacttgcggaccttttacaatgatttctccatgctcatacggagcggcaagctcacccgtctcttcagaatagatcgcagcgtccgtactcggccaaggacagccgatactgcccggcttgttttttccccagataaagttggcgtgcgtcactggggatgcctcagacaaaccatagccttccacaagctttccgccagtcaccttttcaaatttctgctttacctccacggggagcgcggctgatccgctaagacagcttttaatggatgacagatcataatgctgcaattcggggtgatgcaaaaggccaatgtaaattgtcggtgcgccaggaaagagcgtcggtttgtgtttgtcgatgattttcagtgtttcgagcggatcaaacttaggaagaagaatcatttcgaagcctagtttaatcgaatagttcatgactgccgtcagtccgtagacatgaaaaaatggaacgatgcccagcactttttcagcgccttctttcacgtcatacatccaagcggcgcacatttcagtatttgccaaaatattttggtgcgtgagcatgaccccttttggagctccggttgttcctccggtatactggaggacagcgatatcatgctcaggatcgatcttcgggattgtcaggagttcagttttttcctgcttcatactggaagcgaacgtgtgaatgttagctgttttgtcaaagtcgatatgcactttttgtttttgcgtcagcgggtaaagaatattcttcggaaaaggcaaatagtcttttacgctggttatcaaaatctggtcaactattgatagcgttttcatttttattgccttcgggaaaagcaaatctaaggtgatgattacacttacctgagcatctctaagctggtattcaagctcatgctcggtataaagcggattcgtctgcaccacgatgccaccggcaaacaagacgccataataagaaatcactgtttgcgggcaattgggcagcataacagccactctgtctcctttttgcaggccattgcactgcaaaaaagctgcaagtttaagagcatccgtcagaatgtcatgaaaggtgagtttttttccataaaacgatattgcggttttatcagggaatcgtgcggcggagtctgtcaggatggattgcagggttttattcggcaacgggagctcatgcgggatatcgttgggatactcggcaagccacggcttttgagactgcataaaacctccccctttcgattttagagttccaccttatcattatagcagatggacggcaaaaaaaagaaaaagaaaggtaaatctttctttttctcataatatgaacagatatataagaccaattaacaaaaagattcccgccgcggcgagcagtacttttgcaagcttttccatttattctccgtccccttatattccggctgccaccacaaatgaaagcccgacagaaatgacaaatgaaataaagccgacagcccggttatcattttcgatttcctgatcaattttaaaccgcggagtcaaaaactcaaaaataaagtagctgatcagaagcataacaaacccgtaaacgccccagccgatcatttgcagcagcgaattatgctgggagatggaatgctgaaatacgtttgcgatccccaaaatttttccgccggtcgccattgccaccgcaagatttcctttttgaatctcttcccagtttttataagccgtcaccagctcaaacacagtcaaaaagaggacgaggcagagaaccgcgacactgtaatatgccgcgatttccacaagctcgttttcccaaaaatcactcatggccatactcccttttattttagttcaacaaccgtaacgcctgatcctccctcacctgcttcaccgaaacgggaacttttgacgctgcggtggtttttcagaagatcctgtacgccttttcttaaagcgccggttccttttccgtggatgattgacactcttggatatccggctaacaccgcatcatccaagtatttttcaacccggcttagggcattttcatagcgttcgccgcggagatcaagttcaagcgatacgtgatagtcctttcccttgaccgctgtaatgattttttctttttttggctccggagctgatttgataaactccagatctttttcttttactttcatctttaaaataccgatttggacattccattcattgccgcctgttttttcgagcaatgttcctttttgcccgaaagtgaggactttcacctcgtcgccaggcttaaagtcgcgtttttgcgctttcggcttctccggtttcttggacttttcaaaagccggcatagcgccttctaaccgtttcttcgcgttaatcagctcgtgatccttgaaggatttgtgttcttcttttatggagcgcaattcatgaataatgtcctcggcttctttcattgccgcttttactttttcagcagcctgctgttctgcctcttcaagcattttgtcttttttgctgttaagctcgatgatttgctgctgcagctctttatgcagtttttccgcttcttttctgattgattctgtctcagaaagctcttcttccgcacgttttttgctttgttccagcgacgcaatcatcgtatcgacttcgttatgctcggccgtcatttctgacttcgcctgcccgatgatatggtccggaagcccgaggcgttttgaaatttcgaaagcattgcttcgacccggcacaccaattaaaagtttataggtcggtgacagcgtttcgatgtcaaattcaacgctggcattcatgacgccttctctgttatagccgtacgccttcaattccggataatgcgtcgtagctaacactcgtgcattggtgcgatgcacgtcatccaagatgctcatggcgagggccgccccctcctgcggatctgtccctgcaccaagttcatcgaaaagcacaaggctgttttcattgacctgttctaaaatgccgacaatattcaccatatgggatgagaacgtacttaaactttgctcaatcgactgttcatcaccgatatcagcgaatacgtgctcaaatactgccgcttctgacccttcatctgccgggatatgaagacctgactgcgccattaaggttagcaggcctaacgttttaagggtgactgttttccccccggtgtttggccctgtgatgacaatggttgaaaaatcgcggccaagctcgatgtcattggcaacaacttgatcaggcggaagcaatggatggcgggcttttttcaaacggataaagccggtgtcgttcataatcggttttgtcgctttaaccgcttttgcatatctagcttttgcaaaaataaagtcaagcgtctgcagcacttgcaaatctagaaatagttcctctgtatactctgccgttttctctgtcagcacacgcaaaatccgttcaatttcttgcttttctttcactttcgcctgctgaagggaattgttcatatctacaatcgcctgcggttcaatgaatagtgtcgcaccagaggatgaggtgtcgtgcacaattcctccatagctggatctgtactcctgtttgaccgggatcacaaagcggtcattccgaatcgtaacaatcgtatcagacagcattttcgatgcggaagaggaacgcagcatcgactctaaccggtctctgactcttgattcgagtgttctgagctgtgtgcggattcctcttaatgtttccgatgcatgatcaagcacttctccgtgatcatcaatgcaggaattaatgtcccgctctaaatcggacagcgtgataagctgttcagcatgctgatggatcagcggaatgtcgacaccgtcttcagccatttgggtgataaaatgtttcatttgtttaactgcataaagcaggcctgagatttcagtgaattcagaaggactgagaacactgccgatttccgcccgtcttaacgctcctctgatatctacaaggccgccaaatggcgcttggcctctcagccggataatgtcagaagcttcgtctacttcatccagctgttttttgatttcgtctatagaagcagaaggcttaagctcgagaagcatttcttttccgagcgatgaagcggcatgcccaataacctgttctttcactttatgaaattcaagagctgataatactttttgctgcacgattgtgtgagcctccttacttaatcgttgcgcttcagaaatgcctctacgtctttaagcgaccgggcattcagaacgtttttcgtttccgtccatcctttgcgcgcggcagtaacgccagttttcatatcgtctaacatctcaatattatgggcatcagtattaatcaccaatgtaaccccttgttcgtttgctttcattaaatgctctgtgcgcagatcaaggcgcgcagggttggcgttgagttcaagcgccgtatttgttttcctcgcaagctcaatcagctgatcaatatcgatttcgtaaccggcccgtctgccgataaggcgcccggtcggatgtgcgataatgtcaacatgcttgtttgtcagtgccgtctcaagccgtttcataatcacgtgttccggctgattaaaactggaatgaatcgatgcaataacgatatccatttccgcaagcacatcgtcatcataatcgagcgtaccgtcaggcaggatatccatctcaacgcctttcaaaatacggaagttttcaaactctgcattcagcgcgtcaatttcttttgcctgctgcttaagtctttctgcagtaagcccgttggcgacctttaaatattgtgagtgatcggtgatcgccatgtattgatagccttttttgatgcaggcttcagccatctctctgatcgaaaatgcgccatcgctccacgttgagtgcatgtggagatcacctttgatttgcccgagctctatcagttcaatgctgtcgctgtaggtttccacttcctgtccgctttcacgaatttccggcggaatcagcggcaggccgaagtgcgcataaaattcacgttcactcggaaatgttttgatctctccggtttcaactgtctcaacgccgtattcactgatccgctcgccgcgttctttggcgatttggcgcatcttaatattgtgatcctttgatcccgtaaaatgatggagtgttgtcggaaactgctcttccgtcacaagacggaaatcgacgcttgtttcatattcaaaggaaaggatgacggacaccttcgtatctccgcttgcgattacgcttttgatgtttggcagctcaagaagctgctctcttacttcagccggatgatctgtagcaatgatataatccagatccttcaccgtttcccgcgctctgcggagacttccggcacgagaaaatttgatgatatgcgtaaattgagaaagatgctcctcaatttcccgcgcgatccggagggcgtatccgatcgggaaccgttcaggctgttttccggcttccccgagcgcctgtaatattttttcttccgattttttgccgaagcccgcaagaccctggaccttttgctgctcacaggcttccttcagagattctgcatcgtgtacgccgagctctttatacagctttgcgatttttttgccgccgagccccggcagcttcaataaaggcacgagtccttccggcacttctttctgaagcgattcgagcgtgcttgactttccttcatctatatactctttaatgacgctgtacgttccttttccaatgccggacagcgacatcatatcgtccatttctgataagcttcggtcgtcctgttccaaggctgccgccgcttttcggaaggcagatactttaaacgggttgtcccccttgagttccatatagactgcaatggtttcaagcagccggataatatcttttttatgcatatcataaccccagacgttcacatatgtttccatcatacttgaaaaaaacttctccggacaagagaagtttttttatgccccgtactgtgtccacagctcttgtaaaagccctgacaagtacggtgtatggttaatgatcacatttgcgagagacgattgtcccatcatttgctgcaacgcatctaccggcagaacggatgcgacatacagcagcacaaatgtaaataaatagacttctagaaaaccgagaacggctcccagcatctggttgatttgtttaatcaccggaatgccggctacaatactcaggaacgagccgatgattctcagtaagattttagcaatgataaataaaacgataaacgcaatcgcattatagtacgctgcttccaaattccccgtaaaaaaagaaagagccggctgtcccgctgaaaaatcgggtgcgggaatccaatgtaaatgcggtgccacgtttttatagaataaagccgcaaaggcaattgataaaataaagctcgtcaagcggataaactgcaggataaaaccgcgttttaaccccagtaaagtccccatcaggagcaagattaagatgatgatatcaagcatagttgttcaatccttttctttaagctgacgctccagtttttcacatttctcttgtaatttgacataatcgtgcaccacatttaccgctgtcagcactgcaagtttatttatatcaaggtatggatttttttcattgatttctctcattttatcatcaacaattccggcgacatacctcatatgggctctgctttcttcaccgacaatcgtgaagtgctggccgtaaatgtcaacggttgtttttgtttttttgccgtcagacaacgtttctcctccattccgcgagaatcctagttcttatcataacacgtttattaaatgaatggaaagacgagcctcccgctgttatgatacactggtatatacagcgaaaagtgtaaaaaaaggagattattacgtgtcccattcagtgataaaagtatcgttgtctgctattgaccaaatgaaaatgacgtacagcggttcacttacagcctctgttccgcagggagccgtttttcaggcaaaaccgcccggctgtaccattacagcatataaatcaggcaaggtcttgtttcaaggaaaaaacgctgcggcagaatccgcgcgctggggaacagcagagcctcaggaaaagaagaaaacggccaaaaagccggctgatccccgctatgcccctccggcagatatcgccggaatgtctgttatcggttctgacgaagtcggaaccggagattactttggcccaatgacggttgtatgcgcgtacgtcgacaaaaccatgcttcctttaatgaaggaactcggtgttaaggattctaaagatttaaaagatccgcaaatcatcgagattgcccgaaacctgatcaaaactattccatatagcctgctggttttaaaaaatgaaaagtataacagcatgcaggaaaaaggcatgagccaagggaaaatgaaagctttgctgcacaatcaggcgatcacacatttattaagaaaattggatggagtaaagcctgaagccattttgattgaccaattcgctgagccaggcgtctacttcaatcatttaaagggcagagacattgtgaaggagcggacctattttagcacaaaagctgaaggtattcacctggctgtcgctgctgcttcaatcattgcaagatattcatttttaatggaaatggataaactatcacgcgcggcaggaatgacgcttccaaaaggggccggtccgcacgtcgatgaagcggccgccaagctgatcctcaaaaaaggggcatctgcactcagaacctttacaaaactccatttcgccaatacgcaaaaagcgcagcgccttgctgataaaaaacgttcatagaaaaaagcttgcagatttctctgcaagcttttttctcagcctcttaaaacagcttgatatgtgtcttctaacgctttcagcactttgctgtgcgcctttgtcacttcttcttcagtcagtgtttgttcagggttgacatactggagtgagaaagcgactgacttcttgccttcctccatatgttcgccttcgtatacgtcaaagacggttacctctttcagaagcttgccgccagcctctttaatgacgctctcgagctgtccgcttgtaacggttttatctgttacaagggcgatatcacgtgtcacagacggatatttcggaatcgccgtgtaaacaagcggtgctgtttctgctgcgagcaacgcatgaagatcgagctcaaatacgtatgtttcctttatatccagttctttttccaatgaagggtggacttggccgatgaagccgatcagagaaccattcaataaaatgttcgctgttctgcccggatgcagctgtttgcgttcagactgtacaaattcaatgctgtctaggacgttgagtttgtctaacagcccttccacaattcctttgacaacaaagaaatcaactggtttcttttcaccctgccatagctgcttgcgccataatccggtaacagctcctgctacgcgttctgtttcaacaggttttgtgtcctcttccttcgttaggaaaacggagccaacttcgtacagtgcaactgagtcagtctgcctcgcaaggttgtaagaaacagaatcaagcagattcggaacaagactgtgtctgagaatgcttctttcttcactcattggaagcgcaagcacagtattcagtgatttttcaatcgcaaacgctgccgctttcttctcgtttgtcagtgagtaagtgatggcctgtgataagcctgcgccttcaaggaagcgtctgactttacggcgttttgcctgatatggcgttaatccgcctgtagttcccgctgtctcaggaagcgtagacggaatgttatcgtagccgtacagtcttgccgcttcttcaattaaatcctcttctattgtaatgtcgccgcggcgtgatgggacagtcacaacgagaagttcatccgcttcaccgaccgtaaaaccgagacgtttataaatgctgatcagttcttctttactgatcgtcaggcctagaacgctgctcactttgtcagcagatacgtgaatgttatttgcttcgattgtcaggtgatcttcctcaactgttccagcaagcacctcaccgccggcatacagatggatcatctgcgcagcccgttctgctgcaagacgtacgcgcgccggatcaattcctttttcaaatcttacgcttgattcacttctcaaaccaaggtctttggaagccttgcgaaccgtctgcccattgaaatacgcagcctcaagcaaaatcgttttcgtatcttcctgaacctctgactctgctcctcccatgacacccgcaacggcctgcgctttcgttccgtttgtaatgacaaggtgatcggcggacagcttacgttcttgatcatcaagagttacgatcatttcattctcagctgcttttcttactacgacttccttagagccaaatctgtcataatcaaacgcatgaagcggctgtccgtattccaacaggacaaaatttgtgatgtcaacgacgttgttgtgcggacgaatgcctgcattcatcagctttgtctgcatccaaagcggtgacggagcaatcgtgacatttttaatgatttttgcagtgtacagcgggttcgcttcttgatcttcaattttgactgaaatgtaatcagacgcttgttctgaagcagccgggtaatccgtttgcggaagctttacctcagtgtctaaaatcgcggcaacctcgtaagcaacaccaagcatgttcatggcatccgcgcggtttggcgttaaacccagctcaagaatcgcatcgtcaagctgtaaagccgctaaggcatcgcttcctgtttcagcgtcattagggaatacgaaaatgccttctgcatactccttcgccacaagtttgctttcgataccaagctcctgtaaggaacagatcatgccatttgattcttcaccgcgaagcttggcttttttgattttgaaattgcccggcagcaccgctccgactgttgcaactgcgactttttgtcccttatccacattcggcgcgccgcaaatgatttgtacaggggcttcagctccgatatccacaaggcacttattcagcttatcagcattcgggtgctgctcgcgctccagcacatggccgatgacaacacctttgatgccttctcctttgtattcaattccttcaacctcaataccggctcttgtaattttttcagcaagaacagccgggtccatgccttttaaatcaacataatcctctaaccatttataagaaacaaacatccttgcatcctcctcttacgcctgtttaaactgcgaaataaatctgacatcgtttgtatagaagtggcggatatcatcaatgccgtatttcagcatcgcgatgcgctcaacacccattccgaatgcgaagccctgatattccttcggatcaaagccagccattttaagcacgttcgggtgaaccattccggcaccgaggatttcaatccagcctgttcctttacatactgagcagccgttcccaccacatttaaagcatgtcacatccacttctactgaaggctcagtaaacgggaagaagcttgggcggagtctgatttcgcggtcttgtccgaacatttttttcgcaacaagttcaagcgttccttttaaatcactcatgctgatgtttttgtcaacgacaagcccttcaatttgcataaattggtgagagtgcgtcgcatcatcgttatcacggcgatatactttacccgggcaaatgattttaacgggacctttgccttcatgcttttccatcgtccgtgtttggacaggggaagtttgcgttctcatcaaagtctcctctgtgatgtaaaagctgtcctgcatatcgcgcgcagggtgttctttcggaagattgagcgattcgaagttgtaataatccgtttcaacctctggcccttcctcgactgtgtagcccataccgataaataaatcttcaatttcttcaatgacaacagtgagcggatggcggccgccgactgcaacagggttccccggcagcgtgacgtcaattgtctgtcctgcaagcttctgtttcatttcctcttcttcaagcttctcgtttttgtcagcaatcgcattggcaatacgctcccttacttcgttcgcgagcgcccccatttttggacgttcctcagcagaaagcttgcccattccgcgcagcacttctgtaatcggccctttttttccgagatattgcacccgaatatcattgacaatcttcaatgagcttgccgcttctacttgttctaaagcttcttgttccagctgttttagcttttcttccattttgcatcctccttttatgtaaacaaaccgtcatatgtctttggaaaataaaaaaaacccgtcccttttacaagggacgagttgtggccgcggtaccacccttatttcagacagactgatgctgtcgtcagcttcattgacataacggaatcagattccggttcacctttacgcgcagtgtacgcggtcccggcgacaactcaagaggtgaagccaatttccggctgcgttaaaaatgctctcagtcagcggcattttctccctggaaagcagttgatcagaaattgaggtcctctgtcacggtttttgaaatattatgttctattatagagaaatccaacgcttggcgcaacactatcctcgcaagtgatacacgaggatggcagccgcaaccgcaacgtttagtgattcagcctgtccgtaaagcggcacgtacaggttcaaatccgttttttccagcaatgcagcatccacccctgcaccttcatttcctacaatgagcgcaaaggattcagactgaggaatctcctggtaaggcgctccgttttgcagcgccgtgccgtatacttttacgccctctgccttcaattcgtccacatatgaaggcaggtttcttctcacaacaggaatatggaagtgagatccttgagcagatcgcagtgtttttccgttaaaggcgtccgccgtgccgtcaccgagtacaaccgcatccaaaccggccgcatcagccgttcgaatcattgtgccaaggtttcccggatcttgaacagcgtcaatcagcagcaccttgcgtgccgttgccagcttttcttcaggcatatggcacacagcggcaatctgctgcggcgtttcggtttcagtcacagctgaaaacgcatcttcactcagcatatagcactggataccagtctcaagatctgaaggaatcttcgtttcatcctttacaaggatttctttcacaatgcccgggcttttcaacgcctcttcaacgaggtgttctccctctatcagaaatgtatttgtttttgttcgttctttttttgtgtgaagctttttccaatccttcactttttggttttttgccgattctatttgtttcactgtctatgtggcgctcctttttttaacatgatgttattatatcgcaagaacagcacataataaaccaggtgcagggttagaatatacgtattacattttagaaaaaggagcgttttacatggatcttaatttacgtcatgccgtcatctccaatgtcaccggcaataatcaggagcagcttgagcatacaatcgtagatgcgattcaaagcggtgaagaaaaaatgcttccagggctcggcgttttattcgaagtcatttggcagcacgcatccgaaagtgagaaaaacgaaatgctgaaaacgcttgaaggcggattaaaacccgccgaataagacatgaaaccgggtgacagcgcccggtttttttcttatataataaaaacatgatgagggggaacgccatgtttttacagccgttattagcgaaaaaaattattgctgaagtaaaaaaaatgtacgaacgtgaagtcattattgtaaacacggacggtcttattatggcaggcacaaacgatgaacgtgtcggacaatttcatgagggagcgcttatctgcgcaaaagaaagacgcagcgtgattattacaaaagaagatgaaacaagattaaaaggagtgaaagcaggcataaacctccctgtattttttgaccatgatgtgatcgccgtcttcgggctgacaggtgagcctgcagagattcagccattcggagaactgcttcgaaaaatgacagagctgttcattaaggaatcacggcatttagagcaatcccagtggcgtgagagaatgctggagtcctttatgatcgattggctgcaactaaaggagtggtctcccagttttcttgagaaagctcagcttcttggtgttaacctttcctcccggcgccaaatgattcttattcaggggtatgagtggtcacgtcatgatattgaacaaatggcacgcagctggaaatcctcgtaccctgcggatttgttcatcaggtggggaaatgaacggatcttgattaatcatgaagtgccgcagcatgaacaaagggatcggcttttacggaagatccttcacatttgttcgtttgccaataccgcaaacagccaatttgcagcagctggcgccggaagggctgtcgcaagctccagcctgacagattcatacgagcaagcggaaaaagcgctggctgtcagccttaagcgaaaaacgcccatatttgaagaggatctgaagcttgatatgtgtctgacggagatcagcccgggaacccgaaacgaatttccgcaaagagtattaggagaggcgctagagcatcaggaacttatgaatacgttacggactttctttcatcacgatttgtctttgaaacaaaccgcagaagatatgcatattcatatcaatacattgcgttatcgtctggctaaggctgaacagctgacgggtttacgttttgaccgtaccgaggacgtcgtcacgatgtacgtcgcactctattttttagatcaagatacaaaatagagagagtttcagtttcattttttgtatgtttctccatggaaggctttgctttttttcttttacaatagattgaaagcattttttgacagggggatgggtgaaatgatcaccaaggatgtaaaggaacagctgattcaggtctccggaccagaaaactttgatgactcgaatgccggccgtctcgtctattcatatgatgcgacgcctcagtatcagtctatgcctgatgccgtgattgctccgaggaatactgatgaagtatcacgcattttaacaatttgcagcgaacatcgagtgccgatcgttccaagaggatcagggacaaacctgtgcggcggcacgtgcccgactgaaggcggacttgtgcttctctttaagcacatgaaccagattcttgaaattgatgaagaaaatttaactgccacagttcagccgggcgtcattacgctggatatgatccgcgcggttgaaagcaaaggtttgttttatccgcctgacccgagttctatgaaaatatcaaccatgggcggaaacatcaatgaaaattccggcgggctccgcggattaaaatacggcgtcacccgcgactatgttattggactggaggttgtgctcgcaaatggtgacatcatccgcaccgggggaaaactcgcaaaggatgtggccggatacgatctcacacgtctttttgtcggctcagaaggaacactcggcattgtgaccgaagccatcgtcaaacttgttccaaagccggaaacaaagaagacgttgcttgctctttatgaaaacatcgatgccgctgctcaaacggtatcggacattattgccgcaaaaattatacccgccacgcttgaatttctcgaccagcctacacttttggtgattgaggattatgccaaaatcggacttccgacaagcgcaaaagcagttctgttaattgaacaagacgggccatttgaaactgttgaacgggatatggaaaagattgaggcgatctgcaaaaaaggcgacgccgtttccgttcagaccgcacaaacagaggaggaagcgtttgccctgactgaagcccggcgttctgcactttctgccctagcccgcctcaaaccgacgacgattttagaggatgcgaccgttcctcgctcagaaatcgccaatatggttaaagcgattaatgatattgctgctaaatatgatatttccatctgcacctttggtcatgcgggagacgggaaccttcacccgacatgcacgacagacataagaaataaggatgaaatggaacgtgtcgaacaggcttttgccgagatttttgagaaagcgattgaacttggcgggacgataaccggagagcacggagtcggggaaatgaaagcgccttacttggaaatgaagctgaaaaaagaaggcattgatgcgatgaaagcgttgaaagcggcatttgacccccggaacatattaaatcccggcaaaatgtttgcgaaagatgccagaaaacgtgtggtggcggaaagatgacaacagaaaaagaaatgaaacagatccaaaatgaatttaaagagcgtatggatgaaggagagttattaaattgtatgcgctgcggcttctgtcttccttcctgtccgacctatatcgaatcgggatttcaggaaacacactctccgcgtgggcgcatcgccttaatgaaagccgtagccgacggtatgattgaaccggatgaagatgtcgaacggtcgctgtcactttgcctcggctgccgcgcctgtgagcctgtatgcccgtctggcgtgaaatacgggcagctgcttgaggaagccagagatattatccaccaaaataaaaaacactctcttggtgaacgtgtcatgcgaaagacggcttttcacgagctgtttccgcatcaaaaccgcatgcgctcagctgtaagccttatcggtttgtatcagcgttcaggactgcaaaccgctgtgcgaaaatcaggcatgcttcggatcctgcctgagcatttgcggacgatggaagctgttcttcctgatgttccaaaaagcaaagacatgaaacatcggccgcgtttcctgccgtccattggccccatgaaaaaacgggtcgcctttttttcgggctgcttaatggatacgatgtttttaccgactaacaatgccacattgaagcttttacagctggcaggctgcgacattgtcatcccgcctgaacaggcttgctgcggggcgcttcatggacacagcggtgaaaaaaacacagggaaagagctcgcgaaacaaaatatcgctgctttcgaagcattagacgtggatgcagtcattacaaacgcaggaggatgcggagcctttctgaccgaatatgatcatttgctgaaggatgacccggaatggtcggagcgggccgccgcttttgttcaaaagctaaaggatttttcttccgttttggttgaacttgatttccatcaaatggacttagcgctcgagacgcctcaggtcgttacctaccaagattcatgccaccttagaaatgtaatgcatacgtcgcttgagccccgccagcttcttaaaagcatcaaaggggctgaattcaaagaaatggagaaagcagacagctgctgcgggtcagcgggaatttacaacatcgtcgaagctgaaatgtctatgagaatactggacagcaaaatggctgccgttaaagcaaccgaagcgattctcattgtaacagcaaatcccggctgcctgctgcagatgaagctcggcattgaacgcgaaggactaagcggtaaagtcagagccgttcacctggctgatttgctattggaagcagccgggcacaaaacatcatgagaaagcccaaaacagatattgttttgggcttttgtgcgttattccatcggactgcaaatttcgatataatgtccatccggatcagcgatataggcgaccgtctgcccccatggtttcactttcggctccccgataatcgatacgccttgttctctcatccttttgatgaccgcttctacattttcagtaacaaacccgatttcaaatgtgtttgaagcagatgtatccggaatgtccagcgccgtgatgtctctggcgctttcccgcgtattaagcgccaatatcgtagaccctgtttcaaattcgacatacgtgccgtgttcagcacgaatcggcagtcctaaaatatcccggtaaaaatgaatagcccgctggctgtccgatacgtatagaataagatatttcattgatagattcattgccaacccccctcagcatttttcaatagtccttctagcccggtatagatgcttccatccttaagctcggatctttccacatctgcgcccattttttcacagccgccacgataatgatgaagcctaacaccagcatgatgatagataatacgccattcaatacactatatcctgctgcttcaggattgagatacacattgcgcaccatccaatagcccgcataattgacagtgacatataaataggcaagcgggataaggcaagtcagaatgtaccggcgtttatcagcgattttcagcacgatcgtcgctccgataatcagccccactgaagccatcagctgattagaaacgccgaacagcgcccaaatggaaccgatatctcctgaatacagcaagtacccccacatcaaacaggcaagcgcgctggcaaatacagagcccggaatccagtctgttttcttcagcggtttatacacctccccgaagaaatcctggatcaaataacgggcaacgcgtgtgccggcgtcaatcgctgttaaaataaagaccgcttcaaacataatgacaaattggaaaaagtatgaggccaaatggctgaaaaacggcattccggtaaaaatataagtcatccccaccgcaagcgtgacggctccccctgttcttccttctaagtccaaaccgatttccccgctcaattcaggcaaatgtacgacattcatgccaagcgtacggaaaacctcaggcgtgctgttaatcgcaaagtaatcagcaggctgtaaagcggtcgctgcaatcagcgccatgatgccgacaagacactcaacaagcattgcgccaaacgcaaccggcttcatatcactccatttattcagcattttcggtgtcgttcctgagccgacaaaggcatggaacccagagatcgccccgcaggcgatggttattgagatgaacggccagacaggtcctgccagcaccggcccgccgccttttacgaattctgtaaacgcaggaaacggaatagacggattgacgacaaacacaccaacaatcaaagcgataaaaacaccgattttcataaagctgcttaaataatcacgcggtgcaagaagcagccaaacgggaagcgcagccgcaaaaaacgcataaacaggaagcgcgattgcaagcgttttcgtatctagcgttaaaaagtcaccgagcgcggtagtctgtacccatggaccaataaagactcctgccattaaaaagagaaagccgaccgttgaagcgagctttaaatttcccgttttcttataaaataagcccacacccatcgcaatcggaatcgtaatccctaccgcaaatgttccccatggattacgttcaagcgcatgcaagacaaccatcgacaggcccgccattgtgatcgtgatgataaacagcatggacagtcctgtacaaaatcctgcaacagggccaagctcatccttcgccacttccgacagcgattttccgtttttgcgcatcgatgcaaacaacaccacaatatcatggacggctcccccaattaccgccccgattaacagccacaataatcccggcaaatagccaaactgcgccgccagaattggtccgaccagcggcccggccgctgcgatcgcggcaaagtggtggccgaacgaaacccatttatttgtaggcacatagtctttcccatcctcaagcgcatgagcaggtgttggcttgtcatcattcactttgagaaccttcaccatcataaatgttccgtataaacgataggcaatagccaaaatacacattgatgctatcacaattgtaaccgcattcattttctcccatcccctttgctgtttttcataaatatatcacaatttcatggtgaaaagcggtcattttttcctatacaaaaagccggcttgaacgggccggctcgtggcagttgaaagacaagccggagatttctctccggctttgctattcttatgactgttttttcaggcggatcacattccaggaaagcggcgtgaaatgagcagttaagccgttttcgctgacagacgatgatccgttggaatgcggaacgacattttttctgttatgctggtttgtcgctttgatatcctgatgctcaagtacgatgtgctctgcgatttggtaagattcaaagcctctgagcgaaatctccgtctccatctgatcctcagccttgtttaccgcaaaaatagtgagggtttcttcctcttcagagtacacaacagcagcatcaacatatggcacatcagtgaaatcagaacaatcgtacttaggagaagaaataagcggtttcagtgactcgccccttccgtaaacagaagcatgcatgtatggatagaaaatcggctgtctccatgcttctccgcctttttccgtcatgatcggcgcgatgacattgacaagctgtgcaagacacgcaattttcacacggtctgcgtgctgcagcatcgtaatgagcagagagccgactaataaggcatcttcaaaattgtaaatatcctctaaaatcggacgcgcagtgatccacggctcgacttttttatcagcctcatttgagtggtaccatacgttccattcatccagagagagattgatagttttcttgctgcgtgtttttgcttttacatagtcacaggtcgcagcgactgatttgataaaatgatccaaatccatggaacgggccaagtagtttggcagattgttatcccggtttccgtagtaggtgtgaagagagatatagtcgacatgctcatacgtatgctccagcaccttcgcttcccaatcgataaaggtcggcatgccgctgtttgagctgccgcaggcaacgagttcaattgatggatcaacccatttcatgacctttgccgtctctgcggctagccgtccgtattcatcagctgttttgtggccgatctgccacggtccatccatttcgtttcctaagcaccatgttttaatgccgtacggctgttcatagccatgcgatcttcttaaatcactccagtaagagcctttcgggtggttgcagtattcaacgagattacgggcggcatctatgcctcttgtgccgaggttgacggccatattgacctcagtgttcacctttttggcccaagataaaaattcatttgttcccacttcattggtttctgtcgtttgccatgccaagtcaagccttctcgggcggttttcgactggtccgacaccgtcctcccagttgtatccggataaaaagtttccgcccggatagcggatgatgggaacctgtaattctttgatcagcgactgaacatcttttctaaacccatcttcatccgcttcagggtgatcaggctcgtatatgccttcatataccgcacgacccatatgttcgataaacgagccataaatccgtttatctacttcaccgattttatattctttgtctacaatcattcgcgcttttttcatcacacgtttcctccttcattaacctttgactccccctaccgtcaggccggagataaagtacttttggaaaaacaagaaaatgataatcaccggcaaaatcgcaaatactgagccggatataagcatgtcgtaattatttccataagggctcagcaagctggacagccctattggaagcgtaaacatttctttcgaccgaagcacaatcagcggccacaagaagttgttccagctgtttaaggactgaaggataatcatcgcaccgaaagccggtttcatcagcggtgccataatcctgaaaaagatgccgaattccgtacagccgtccatccttgcagagtccagcagatctcttggaaggccaagagcatattgcctaaaaaagaaaacggcaacaggtgaaacgataaacggcaatatgacacctgtatatgaatcgatcaagtgcagtccgacggtaagcttaaacagaggaagcatcatcacttccagcggaaccatcatgataatcagcacaagaacaaagatgatatttctgcccttaaaatcataaaccgcaagcccgtacccgatcatcgaagaaaaaaacagggtgagcacggttgtgaaaagcccaagtacaagactgttaaaaaaccatttgaaataaatgcttccgccgttaaacagaaatgtataattatcaagactcattactttaggatcaatgtcgagattgagccccacacgcaaaagctcagatgacggctttaatgatcctaaaagcaaacagaaaatcggaaaaagatacaataggctcagcatcataaaaaacagggttagtgcgattctgtaaacgctgaactgaggactgtgccgcaacatttatccctcccccttaaacgagcctgacagctttaatgaaatcaggctgacaacaaggatcacaatcaaaagcacgatgccgatggctgctccgtaccccatttcgttgtaggcaagcccctgctgatacaaatatccgacaagcgtcagaccaatattacccggggaattattctgccaaaggacgtagctttcctcaaacatcctgaagccgccgatgatgctgatggtcagcacatatacggttacaggcttgagaaacggcagcgtgatgtgcagaaattttttcattgtattcgcgccgtctatatcagcggcttcgtacagctctttcggcacattttgcaaaccggctaaaaagtaaaggatgttgattcccatccatctccatgaagcaagcagcaccatcaaaaacatgccggtatgttcattgttcatccagttctgaggtgaaaagccgagtttgagtaggatggaattggccagagacgtttccatttctccgaagatcagccgaaaaatgatccccgcgacaatggttgaggtcaatgccgggataaataatgctgatttaaatatatttctaaatttgaccagctttgaattcaggaatatggccagaagcaatggaacaggaatcagcacgatcagcgtccaaaaggtgtattccagcgtattccaaagggcggtatagaacgtcgggttgtttagcgctgtataattagacaatccgacaaaggacacctctcccggcaaaattctttggaagctcatgatgaagacactaatgatggggtatagaaaaaatacgagaaaggataaaacgaatggcgctgtaaacagatagggcgccgctttttttgaataaaacagatctcgccagcctgattgtttcgcagctgaaggaacgggatgaaccgttcctgttttcacaggtttcatgagaacctccccgctttcactttttgaatgggattctatttctgtttcagttcacctgccgctctgtccaaggcttgtttaggcgttttttgctgagatttaagtgcgtcgaacaacacgcttctgttgacaaggtctgaagccttggcaaaatcctcatgtaaataaatcggattgatttcatccttgatatcgagcagcacagaaaaaatgcctgttccgttttggaagtaatccgtgtatttgtttttctctttcaattccttggagctccaaacatcccagcgaagcgggtcaaagccgagtacgctccagagttttttatttccttcttcagagcccttcgcaaaggccaaaaactcttttgctaactcaacatgcttggattgcttcggcacaacggttgccgtaccgcccaagcctgccgagcggtcgcccccctctttccatgccgggagcggcctgatggcaatcttccctttcagatcaggcatataatcgataaatcttcccatataccaaatcggcatgaggactgaagcagctcctccttggttcataaagccgtagtattcttcactgtgatgcccgccgcccggcgcaggaatcatcgttttatcattgatcatgtcttttaaatattgaagtgtttttacgttggtgtcattattgaggatcagcttgccgtttttatcaaaatagcctgagttttgctgtgaaatcatagataagaacgttgcggaatcatttgtttccaccgttcccatcggcttcccggtcactttgcgcactttctgtccggctttatggtaatcatcccatgttttaatatcgtcaggattgacgccggcttttttcatcacatccatgttataaaacatgaccgttgttcctacatgcgtatcgagtccgtaaagcttgccgtttttgctgtacagggtcagccgcgcctcaacgaatttatcgcggtccttttcaatcagcggagtcaagtcggcaagcggtatgtcagagcccttcaaaaagtttgaaaaacgggccaattcgacatcggcaatatcagggacgccttctcctgcaattaaggagatagacaagttatcgtgcatttgtccatacggataaacgaccgtattcagcttaattttgcggtcaggatatttttcattccattccttcaccatttctacatagaactgctcatgaagtccgttaaatgtccaaaaggtcagctcggtttcacccgacttcccggatgatctttctgctgaacacccagcaatgactaatgtcaatgtcagcaacatcatgagcacaagaaaacagacagtcatttttttcatctgcgttaccccttccattcgaggtgcgggctattcatatagaccatggttgatcagcgttttgttttcattgatgattcttaatccggtgcagcggtctcttaaggtgtgcgcgtgtctgaaggcattcttgacggaatcctgcccgacaccgatttcgtcaaaatacgcagggcctccggctgatctcagccaatcagccagcacttctccttccgggagagtttgataagccgattggatggcttgccgccggctcggtgaaaattcgttcagcccgtcatccttagcgagctttctgtatgtgtcagttaataaaacagctgcacagcccacctttgccccatgaagaatctgtggccgttttttctccattaattccatctcaatccaatgtgaaatatgatgctcgccgcctgatgccggtcgggaatgatctaatgccagcatgacaagccccgatacaagtaaagactccatcaaaacccgtatgccagtttccgttttcatcgcaatgtcttctgtgtgttcaatgcaggcagcaagcgcctcctgaacaatcttagctcctgctggcgaataaggctcgccggcaagatgccgggatatttcccaatctgctaaagacgttattttaccgagcatgtcaccaaagccagctgccaccattgactgcggtgccgcttttaatagatccagatcagcgaacagtgcagatggggccttcgtttgaatggttgttttcgtgccatataaaataatcggcgcaccggctgatgtaaaaccgtctacagatggagcagtcggataagaaataaacggcaaatctctttgaaacgccgcaaagcggacgatatcatgaatcgtgcccgaaccgactgcgatcatgacatccgttggttgtttcgtatggatcagcacatgaatgagcgatcgttcatcagctgtcacatctccggcttcattttctggaatgatcaggcactcggcctgaaatccttcttgattcagctgattttccagatcaattcctgcaatgcggtgtgtattcgcatcgcagacaaggacaatatgtttattgtttttttgttttacgtaattcaaaagcgaatcagctgcttgtttaccgagaacaatttcttcaacttttataggcaacgtcttttctccggcgtgttcaaaagcacgctgaacgtcagctgcgatacgattcatatcagaatcccctcctcagccaatttggttacatccttaatagaatccagcacataatccggcgtgtacaaacgctgttcgccctgtttcgcagaaccagttagcactaaggcgcttttcatgccataaagcttccccatcgcaatgtcagattcaatgctgtctcctataatcatgcattcatgtgcggacagccccattgctgtacaggcagcctccgccatcagccatgacggttttccgacaacaagttcagtcttcgcttgtgcggaagcctctatcgccccaatcattccagccacatcaatggcatttccgtcttcgttcggaaaagagcggtctttgtttgtagcgataatacgagcgccgccggcagccgcttgaaaggcttgatttaaatcgtcgtacgtgagcgtttcatgaagggagatcacgagccaatccgcttccttcggttcgttcgcgttctgcacaccggccagcctcagctcgtcaaccaagccttgttccccaagcacccatacctttgaaaaacgataatgttttttcagaaaagccgctgtcacgcttgatgacagaacaatgtcgtttacgtccgtttcaatccccgcgccaagaagtttttttctgcacatggcacgggagatattcccccggttgcttaaaaagacgattttctttcccattctcctaagcgttttgatcgcttctcttgctccttcgatcaactcatttcctctgaatacagtaccgtccaagtcaatcagaatgccagccggtgacacaggcgtatcatgactggccataatacgcatttgctccgtgttttcgataaaaatgcttttcatgcaggactgtattgattggggttacatccttgttcagcataatggagtgataggccatttcggcaaccgtttctaatacaactgcgttatgaatggcatttaaggcgtcagtgccccagcagaacggtccgtgattattcacgagcacacccggcacctgttcgtagttatgatgctgaaaggtttccgctatgacttttcctgtattcagttcgtagtcatgaatgatttcttcatcgtacatttcacgagtacatggaatcgcactgtcaaaataatcagcatgggtcgtgcctaacggagggatgtctctgcccgattgtgcccagcttgtcgcccattgagaatgggtatggacaattcccccgatattcggaaaggctttatataaataaacatgggtaggtgtatctgaagaaggcttaagcgagccttcgacgacctctccatcaaggttcaaaacaaccaagtcatcggctgtcaggtcgctgtattcgactccgctaggtttgatgacaattctttctttttcacggtcaatgccgctgacatttccccacgtaaaggttaccagctgatgctcttgaagcttcaggttggcagccagcacttctttttttaatgtttcaagcatgctccatcaccctttatcaattctttttggcggcagatgaaaattgaagatttttgatcgttttcagacgtttcatgacatggttttcttttccgaaataatgaaccagctctttatattcagcgtacaatttttcataaaccgcggcgttttcggcatttggcgtataagttatatctttcagttttcccatgttcgccgctgcctctttgatgtcatcgtagccgcctttttctttgcctgctgcaagcgcgccgaaaatggcagatcctaaggctggtgcttgcggtgaaccagagattttaatgtccatgtttgtcacatccgcataaatctgcatgacaaacgggtttttctcagctattccgccggctgcgtatagttcctcaatcggaacaccgctttctttgaatgtttcgataatcattcgggttccgtaagctgtcgcttcaactaacgctctataaatctcttcaggcttcgtcagcagtgtcatgccaagcagcatccctgttaaatctgcatcaacaagagttgaacggtttccattccaccaatctaaagcaagcaagccgctttcaccaggcgcttgatggtttgctttctcactcagcagctcatgaacgccaatgtttttttcctttgcttcctcttgataagctggcgggacacatgttttcacaaaccagtcaaaatgatcgccgacacaggactgcccggcttcatatcccgcatagcccgggagaattccgttgtccacaacgccgcacattcctggaacgatatgcacctcttcaccaagtagaacatggcacgtcgaggttcccataatcatcagcattttccctggctctgtaatgccgaccgccggtacggaaacatgagcgtccacattggcaaccgcaacagccgttcccgggagaagtccggtcagctttgccattttttcagtcagactgccggctttttctcctactgaatgaatagaacctgacaatttgtcttttgtaatcgttttcattgaaggatttaatttctcaaagaaatcatctgacggataccccgctttttcactccacatcgctttataccctgcggtacaattgcttcgcttgagcgagccgcacagctggtacacgatccagtccgcagcctcgatgatccggtcagccgcttcataaatgtgaggcgcttcctcggcaatttgcatgacctttggaatcatccattctgatgaaatttttcctccgtaccgctgtaaaaaagcctctccttcttcttccgcgatttgattgagccgatcagcatgtttttgggccgcatgatgcttccagagcttcacatagctgtgcggctcctcttcatattcaggcagcatgcataacggctgcccgctgctgtcaataggaaggatcgtacatgccgtgaaatcaattccaatcccgataatgtctttcggttcaacgcccgtctgttcgagtaaagacggaatggttgtttccaagacttcgaggtaatcagcagggtgctgcagcgcccagtcgcgcggcagcttttgacccgtttttggaaggacggtatcaatgacagcatgcctgtattcttttacagcagccgcaagttcctcccctgtttggacatgaacgagcaccgctcttcctgataaagttccaaaatcaacccctattgtgtaagccatgtgacatccccctctacttttgaagccggtaaagcgcctcgttccattttaactcgtgtttcagtttatgaattgtcgtatcacgggaaatgagaacactttcgatccccgccatttccgcccaatcaagcatttgctccgctgtcagttcataagacaggcaggtatgatgtgcaccgccggctaaaatccatgcctccgctgctgttttcaatgacggctccggcttccagagaacacgggcaaccggtaaattcggcatgtctttttcaatttcctggccggtgacttcattcagcacaaggcggaaacgcccgccaatatcaacaatgctagcttgaatggcagaacccctgatgccgttaaatacaaaacgcgcagggtcctctttgccgccaatcgaaagcggatgaacctcgattttcggctgatccaaagcgacagtcggacacacttcaagcatgtgagagcccagaatcatttcatttcccggttcaaaatggtacgtgtaatcttccatgaaggaagttctttttcctttagccatgattttcatcatccgtacaagggccgctgtcttccaatctccttcaccggcaaacccatagcctttctccatcaggcgctgaacggcaagtcccggcagctgtttcattccgtgcagcacttcaaacgatgtcgtaaacgctgtgtatccgccttgctcaagaaaagcggttaagccaagttcaattttcgcctgttctttaatggacgctacctttgcttcgtcacgttttgtttcctcactgatcacatatagtctgtcatactcggcataaagcgtgtcaacctcgtcgtccgtaatgcggtccatcacttcaacgagatccccgatgccatatccgtcaacctgccagccaaattgaatatgcgctcccaccttgtctccgtccgttaccgcgacatgacgcatgttatctccaaatctggcaaccttaatatgtctgctttcatttaatgcagccgccgtatccatccactgggacatttcttttttcacttcttcatcatcccaatagccggcaatgacttttcggctaagccccattctcgagttgatgtaaccgtactctcgatcgccatgcgcggattggttgctgttcataaaatccatgtcaatcgtaccccacgggatatcgcgattatattgggtatgcaaatgcataagcggtttttgataagaggaaaggccttctatccacatttttgcaggggaaaatgtgtgcatccatgtaatgatgccagcacatgtctcactgtactccgcttctcttaacagccctctaatggtttccggtgaagtgacgacgggcttatgagtgattttatatctggaagaaatcccgctgagcccctcacaaatgcttttagcatgctgatctacgagttccagcgtctcttccccgtataggtgctggcttcctgtcacaaaccagaattcataatcctttgtctgaagcatgtaaactgcccctttctcataaaataaaacgctttcaaatacaaaagatacgtactaatgatagaaaataaacctataaataaatatttgtacgaacaattttattatagtaattgactattatactgtcaatcttttctttttaaaaaagccgggggcagagcccggctttttgattcaataggacggccagcccgagctccaattcaaatcattgatgagaagctttggaatgccgttgtcattggcatcataggcatggcgaacaagaatgtttccgttcacaatatcctggcctccaggtcctttccattggtcattgcccgaatccaaaatggtgcctccgccttcaagcatgctttttccgcttttatcaagataagggcctgtaatgtttttggatcttccgtaagcaattttgtacgtactgtttaccccgtcacagcatttatcaaatgaaaccattaaatagtaatagccattttgatacgtaagagtaggagcttctaaggcacccccattattcggtctagctgcaatcgaatagagcgagcctgtaggcttcatcgtactcttatcgagcttagtcagcttaatgccgctccaaaacgagccgaatgcaagccacggattgccatccttgtcgaatgtcagctccgggtcaatggcgttataattatttgagcttgtcgaacgaatcaccaagccctcgtccttccagctccccgaactgatgcttgttgaagatgccaggccaatggcagatgtattgcttccaaaagaagaaacggaataatatagccagtacttgccgttatagtattggatgtccggcgcccactggttttgaccataattcggcacataattggaccaccacgatagcggtgtagtgaaaatggatttttgtacggtccaatttttagcgtctgaagacttcaaaacccgcagtccccgttcttcagtaagccctgttccaagcgcataccatgagctcccctctttaatcatagtcgggtcatgaagcagctcattggatgcaccccaaaacgctgcctctgcgggagcagcagaagtgaatatcaaacctgcagccagagctgcactcgaaaagtgtaagaagcgtttccatgtttttttctttttcaattttgtttaacctcctttatattagaaagcgcttacaaattagattgtttatcctcccttcctgtcaaatcgagctgcgtatcgtatatcgtcatgttcaggaaattttcggtatcccctttattgtagtcactatgctgtaatttgtacagacaaaaaaatagaatccgcctaaataggcggattcttccgtatctttattggtacgtaatttcgtcaaccgtttttcggtctaacttcttaatgacttccgtaattaactttaccgcgttttcataatcatcacgatgcagcatggccgcgtgcgtatgaatgtagcgggttgcaatggtaatggacagcgcaggaacgccattcgccgtcaaatggatggcaccagaatcagttccgccgccggcaatggcatcaaattggtacggaatgccggcttcctccgcagtggctacaactgcatcgcgcaaacctttgtgagagaccatggatgcatcgtaaacgataatctgcgggcctttgcccattttgctctgcgcttctttctcggaaatgccaggcgtgtctcctgctatccctacatcaacaccaaacgcaatatcaggctgaatggtgtgtgcagccgttttcgctcccctcaggccgacttcctcctgcacggttccgacgccatacactatatttggatgatctgtgttttgtaagtttcttaacacatcaattgcaatcgcacagccaatgcggttgtcccacgcctttgcgagtaggaatttttcattgttcatgaccgtaaattcaaaatgcggaacgatcatatctcccgggagtacaccccactccaaggcttcttcccggcttgaagctccaatatcaataaacatgtcttttatttccactgatttttttcttgcttcaggagataaaatatgcggcggcttagagccgataaccccagtgatttctcctttaattgtgacaacggtgacgcgctgggcaagcataacctgagcccaccagccgccaacggtttgaaaacggataaagcctttatctgtgatttgtgtcaccataaagccgacttcatccaaatgtccggcgatcataattttcgggccgttttctgcaccagtttttttggcaattaaactgcccaggcgatctgttgtcacctcatcagcaaatggttctatgtatgatttcatcacttgccttacttctctttcattgcccggtatgccttttgcatctgttaaatctttcagcatggtcaatgtttcatctaattttgccatgttccaaaccctccttcatcagtcctgcattcttattatacaaaacatggcgctaaccatacgactatttcacttgaaaatcgggtatatgtttttacagctttcttttagaaaaagtgaaacctttttctatgcttttcgtattacatcagatcatcaccataagggaggtgccttcacacaatgtttgtcatggttctaaggattattttgcttgcactttttgcttattgtatttatgccgtggtcaaatatgtcgcgaatcctaagagaaggcttaagctggcccaatcaaaagaacatttttatattattgatgaacaaaacaatacccggaagaattttcagctgacgtataaaggcgtgctttttgagggagaaaagcatattccttccaaggaccatccgctgtttattcacacgatctttgtctggacagaatctcctgagaagctgaaacatttctctgcaaaagattttgagaacattgaagaaaaagtgctggaacgatatccaaattgtaagattgactgggaccagcccattaaactcgcaaaaaaagcagaagagcgttaaacgcttttctgctttttataaatcaaacgggctgtagtaaatagcgatgagaatcgcttcaattaccagaagaagcggtactccatacttaaaagaagcgtgtttcgttttatgtctgaaggtttgcatgccaagccagacaccgagcgctccaaatacgatggctatcagccacagccggtcttcagaaattctccacttgtgctgttgcgctttgcgtttgtcaatgcccatcacccaaaaaccgcacagattaatcaacaccaaataagctgcaataatcatgttgcctcatcctttatatagaaaaagccgctctgctggagagcggctctatatgattacttgtttaattgagctttagcagcatcagcaagctgattgaatgcagtaagatcgtttacagcaagatcagcaagcattttacggtttacttcgataccagaaagcttaagaccgtgcattaaacggctgtaagaaaggccgttcatgcgagcagctgcgttgatacgagtgatccaaagtttacggaaatcacgttttttctgacgacggtcacggaaagcatagtttccagatttcatgacctgctggttagctactttgtataatgtatgttttgaaccgaaataaccttttgctaatttaagaacctttttacgacgcttacgtgtaacagttccgccttttactcttggcattgaatttccctcctaattgttccttatccgattacttgatgttagcaagcatttgtttgatacgtttgaagtctcctgcgcttacaacagcactcttgcgaagcttacgcttttgcttttgagatttgttggcgaataagtgacttgtgtacgcgtgagaacgttttaacttcccagaacctgtctttttaaaacgtttagcagatccgcggtgagttttcatttttggcatgggatttcctccttattgcttttcgtttttcggtgcgagcattaagaacatgctgcggccgtccatttttggttttgtttcgactgtcgcaacctcagcacatgcttcggagaaacggtctaatacacgctgaccgatttctttatgagtgattgcgcgtcctttaaagcggatagaagctttcactttatcgcctttttcaaggaatttaatcgcattgcgcaatttcgtgttaaagtcatgctcatcgattgtcggacttaaccgaacttcttttaagttaatgattttttgattcttgcgtgcttctttttcctttttctgctgctcaaatcggaacttaccgtagtccatgattcggcagacaggcggttttgcattcgctgcaactaacacaaggtcaagatttgcgcggccggcgatttcaagtgcttcctgacgggacttgattccaagctggtcgccattttgtccgattaaacggacctcacgtgcacggataccctcattaaccaattgatctttgctaataatgagccacctccatagtttcttcgaattgattcacaactcattttgtatgcattttgcaggcaaacaaaaagtgtgggcattataaaacacccacactacgaacatctgtatcaataaaaatgtacggtcaacctgccaactacatgcatgtgtcaatcaggtgagaagcgggtgcttctgcttgtgatttatattcaattcaataactattctacacaataccggatctttagtcaaggacgacttatccggaacaacttttacattgtaacatgggttttctatgagcgcaagagagaaaaagaaaatctttcatcccccccagaatgcaaagaaccaacaattccccccttatttcgcaatttacaacaaaaccaccgacaggaagaaatgtaaaacaaagttaatctctgaccgatataagaagcagaagggagcctgacacatgaacaaactgatacagcttgctttatttttcacattgatattaaccggatgctcaaatagcagcacatcttccgaatcaaaagtcgaaactgttaagacaactgcagcatttcctcaaaaggggctggagaaagagctaaaaaaactaaaacccgtttcattggacatgaagttcgagagtccacttgctactgagttaggaaagcggaaggcaaaagaagaagctgaaaagcaaagacaaatcgccgccgagaaaaagcttgaaaaagagcgggaggcgaaacgaaagaaacagcacgaggaaaaagcggagagacagcgattagcagagcagcaggcggcagagaatcagcgattagcggaagcaaaaagacaagctgaacttgaaagacagcggcaggcagcaatccaaaaagagcagaaagcgaacgctgagaaaaagcggcaatcgcaggcacaacggcagcagactgaggcacccccatctaatagtcaagatccaccatcttcctcgagtcagacagataaaaccattcaacagccagcttcagagcttcctgatgacgatggttatggttatgaagaacgaaaaaagtggcatgacgatcaagtagaatggggcattaaacaagggtatatcgatcccgaagacgcaccataaaataaaaaaagccaaggcattcagccttggcttatccaccgatcagctgcacgaacacagggatgaccagaaccgttaccactcctactacgacaacagcaatacttgccatcgcagcttcaacttctcccatctcaatcccgaccgctacaccaagtgcatgtccggatgttccaagagccaatcctttagaaatcggatttttcactttaaacaccttcaagaacaatgctccgagcgcatatacgatgacagcgttaaagatgaccgcaaaggctgtgatgtcgctgatgcccccgatgccttttgataaaggaagcgcaattgccgttgtagccgcctgcggaagcatgcttttcattacggccgaatcgagatgaatgcctttagcgagcaaataaacaatcgtgacagagcagatagagccggcaataatggaggccatgatttgccaccagtactttttaagcttatctctttgtttgtacaaaggaattgcaaatgcgatcgttgccggttcaaggaaaaacttaatgatctctcccccgttattataatccgcgtaggaaaaaccgccgatttttaaaaatgcgatccccagcaccatggcaacaaacaaaggagtgaaaaggaagaagcctttcgttttcttaaataaaaaggtgccgatgccgaatgcagcaagtgatacgacaatcccaaaataaggactcattgtgctttccatgtgaagaacctcctgtttcccttaatggtgaacgagttcgttattgttctgcgggctttgcactgtttttgttttcatgtccgctgcggttttgcgttttccgctcagcgacagaatcagctgagaaaacaatcccgtagcccccagcaaaataatcgttgcgagcagaatgacaagaacaatttgcaggccgtattgctgcatcacaccgagcgaattcataacagatatacctgacggaacaaataaaaatccgatcagagaggtcaaagacgttccgagcgtctccacttgttccagtttaatgactttcaaacataataggagaaataataagaccaaccctacaaccgatgccgggataggtattgggacaatagcggcaatcatatttgaaaccagcataatgacggcaaaaataaatgcttgtgttaaaaacccgtacacttttttagcactcattttcttcacctctttctctttggtacccccattataaataagaattccctgttataaagcgcttacaagataacatgccgaatagcgggtctgagttgcagaatcaaatggctgaaatgcaaaaagccgcccatcaaatatggagcagctttttcaattccttcgcatatgtccggctgaccggtattttcgatccgtctttcatgatcaaattatacgttgaattaaaccatggctgaatttctttaatatattcggtattcacgacaaagctccgatggacgcggataaaatcagaatccggcagctttttctcaatcacaacgagtgtatcgctgaccgtataagaatgatcgaaggtttttacattgacatgaccatcttctgttccggcatagataatgtccttcgtatccacaatcacaatcgattcccccacagatagcgcgagcttgtgctggccggcatggctgttttgctctgtttctacaatatcccgattgacttttttatattttttcagcgtttgctgaattctttcttcatcgaatggcttggttaaataatcaagagcatccacctcaaacgctttgagtgcatactggtcatacgctgtcgcaaacacaacagcaggaggatgcttcattttcttcaatcgctttgcgatatcaaaaccgttttctccagataaatcaacgtctaaaaacagcaaatcaggtttttgatccatcatttggtcaaaagcggattcgatattttccgcttcattgatttccatttcctcattggtccgcttaagcaagtaagccagttcatctcttgccagcatctcatcatcaactattaacaccctgagcatgttcttctccctctttcatctgttgcattggcacttgaaaggaaacctctgtccctttatgaacctcactgctgatatgcagtgcagcctgctgtccgaataaaccgatcagccgctgatttaggttataaagcgctgtaccggttccctccttagacggaaacggtttctttcccagttccggcaagacgtccggcggaattccgcgtccgttatccgccaccttcatatagacggatgcattatcagataagacacagactgtaaccttgcatatgtcttgttttttcggaaacgcgtgccgaagcgcgttctcgacaagcacctgcaaaacaaacggagggatttcaatctgctccagtctgctgtcgatattaagctcaattttatatttcccgggaaaacgcgcctgttctaatgacaaataggcgttaagatggtttagctcctttgagagcggaatcagcagctgtctcgctccttgaaggtttgaacgaaaataaacactgagctgcaataggagcttacgggttttttcaacatctgtacggcatagcgcagaaatcgtgttgatcgcattaaataaaaaatgcggattcacctgtgcttgaagcgctttaatttcagcatccttgagaagtttgctttgcagctctgcttccccaagctcaagctgtgtcgaaaacagcatggccagcccctcggcaagttcctcctctacctgactcaggcctgccgggcttttaaagtacatttttaaggtgccgattgtattgccgttcgatgtcagcggcagaacaattgcagcgtgcaaagggcattcagcatgcgtgcattcaatctcttcctgcgaaatcgccttcataatatgccctgttttaatcacctttttggacagcccggtgatcaaacttttcgatgggatgtggtgatccattcccgcaccgacatgcgcaaggatcttttctttgtcagtgagagacaccgcatctgttcctgtcagcttatggataatagccgctacacttttacaggagttctcatttaatccttggcgaaaaaatggaagtgtctgatcagcaatcgtcagcactcgatgcgtttcgagagcccttgcctgttcttccttgcgaatgatcgcttgaataatagacagaaaaataaaactgcctgttccattgatgagtatcatcggaattccgatcatgctgacaagctcccaagcgtcactgaacggctttgccatcagcaaaataatgatcatttgcagtgactccatgccgattcccacaagagcggcgatgcgcggtgtcggcattcgatatcgcttcgtaaaatacctgccgatcaagcctgcaagaacacccgctaaaatagatgagacggcacagcttaaggccgtgctgccaccgagtgaaaaacgatgcaggcccgcaagtatgccgatcccagcccctacaaaaggacctccgagaaggcccccgatttccacgcccaaaatacgggtattcgcgatagagcccgatggatctatcgtaaacacccagtcattgtttacaatcatatttctttgaatttcgatgcctgtataattgctgatgatgctgaaaagagaaaaaatagaaattaaaatcgcttttcctttatagccgtcctgattctgaagagcttgtctgaaaagtttcgtatgggcgagaatgaaccctaatataacaataatccccactctctccagcatcataatcattaaatgaatcattcatgtcacctgttctttccgttttcattctagcatgttttcgttttacggctgactgtttttttaaaatcgtctgaaaacatatttcacaaggcttttatctattgtaaaataaaacatgagccttttggcagaaagatttgaatctgaagcagaggagaagatcatgaaagccgtattttttgatttagatgatacactactttgggacgaaaaaagcgtcagaacaacatttgcagaaacttgcttacaggcggagaaaaaatatggccttgcccctgaggaattcgaagcagctgttcgcgaagcggcgagagaattgtacatgtcatatgagacgtatccatatacagtgatgatcggcattaacccgtttgaaggactgtggtccaatttctcagagccaatcagtgaaggctttcaaaagctgaacaagattgtgccggagtacagaagaaatgcatggacaaacggactgaaagcgcttgggatcgatgatcctgcatatggcgaatacttgggagagttttttgcggcagagcgcagaaagcgcccgtttgtatatgatgaaacttttgctgtactcgatcaattaaaaggcaagtatgaattattgcttttgacaaatggcgatccgagtctgcaaaaggagaagcttgccggcgtacctgagctcgctccttacttcaatgaaatcgtcatctcgggcgcattcggcaagggcaagccggatgtttcaatttttgaacactgccttaagctgatgaatattgaaaaagacgatgccatcatggtcggcgataatttgaatactgatattttaggcgcttcaagagccggaatcaaaaccgtttggatcaaccggacggataagaaaaacgaaactgacgtaacgcctgattacatcatcagcagccttcatgatttgtttcctatattagagaaataaaaaagcatgatctcttcaacgagatcatgctttttattttattttttcgcttcagctactgcctttttcacaaactcatcaagtgaaatggtttcagagttctgctctccatacttacggacgtttaccgctccgttttctgcttcttggtcaccgaccaccagcatgtacgggattttttgcatttgcgcttcacggattttgtagccgattttttcatcgcggctgtcgacttcaacacgcaggccttcacgctgcaggcgttcctgcacttttttcgcgtagtctaaatgcacagccggagaaaccgggatgacttggaactgaaccggtgcaagccatgtcggcagcgcgcctttgtgttcttcgattaagaaggcaacaaagcgttccattgttgaaacgacacctctgtgaatgacaaccggacggtgctgcttgccgtcctcaccgatgtatgtcaggtcgaaacgttccggcaataagaaatcaagctgtaccgtagacagtgtttcttcttttccgatcgcagttttcacctgaacatcaagtttagggccgtagaatgccgcttcaccttctgcttcgtaatagtcgtggccgatttcgtccattgcctctttcagcatggattgcgctttgttccacatttcatcgtcatcaaaatatttctctgtatcttccggatcgcggtaagacagacggaatgtgtaatcacttaaaccgaagtcttcatatacatcctggattaaacggactgtacggataaactcatccttaatttgatccgggcgcacaaagatgtgtgcatcatttaacgtcatcccgcgtacgcgttgaagccctgacagcgcacctgacatttcatagcgatgcatcgttccaagctccgcaatacgaatcggaagctcgcggtaactgtgaatgtcttgtttgtaaatcatcatatggtgtggacagttcatcggacgcaatacaagtgtttcattgtccatttccatcggagggaacatgccttcctgataatggtcccaatgccctgatgtttcatacagctctttgctgccaagcacaggtgtgtatacgtgctcatagccgaggctgatttctttatcgacaatgtaacgctcgatgacgcggcggattgtcgcgccttttggcagccaaagcggcaggccttgtccgactttttgagagttcgcgaacagctttaattctttgccgagctttctgtggtcgcgttctttcgcttcttctagcatacgaagatgctcttcaagatcagcttttttgaagaaagctgtaccatatacgcgctgaagcatttggtttttgctgtcgccgcgccagtatgcgcctgcaaggcttaacagcttaaattctttgatttttccggttgaaggaacgtggacgccgcggcacaggtcaaagaattcgccttgctcatagatcgaaacggtttctccttcaggaatcgcatccaatagttcaagcttcaggtcgtcgccgatttccgcaaaacgggctttcgcttcttcacggctgacttcttttcgaacgatcggaaggttcgcattaacgatttttttcatttctttctcgattttcggcagatcctccggtgtaatcgcttcgtccatttctacatcgtagtaaaacccgttttcgataaccggaccgacgccgaatttaacatccttgtagatgcgtttaatcgcttgagccagcaagtgagccgtactgtggcgcataatttgaagaccttcttctgagccttctgtaatgatttccactgtaccgtcttcattgatcggcgttctcaaatcgatttcttttccgttcagttttccggctaatgattttttctttaatcccggactgatggatgccgcgatatcttctgttgttgttcctttcgcaaactccttgactgctccatcaggaaatgtgatttttaccatatctgacatctttgtcactcctttttttgcatataaaaaccccgccccctatgaaagggacgaggttgaataaacggaatcgtggttccacccttttttccgcaaagccaatacggcacctgcggctctaagctctgtaacgggagttcccgtcagccattactgttccttttcaagaggttcacagctgaagttcaaaggcggtaaagcgaatggtccttagctgggaagcttgcagccagggcttccctctctttgagctggtatcattccttcgtgtccttatcaatacgtgtgtctttcttaatctcctatgtattataaattgttcaatccaaaaaatcaacacgatcgcgtttccttttttaaaccgacagccttaaatagacaggctgccggccctcatccttccgagtgcttcaccggtatttctgcatctgtaaaagcatgcagcgggagcatttccactctctcttgaaatacgttttgaatggtccttgccatcatgtgctcgggctggtcggtataaagcacgacttcatcaggcgcaatggaaatcagcggcgcgagcaaatgagaatcaatatacataggatgatcccggacaaatcttctgtctatgtatttcattttttcccgttccggcacatagcgcagctcccataatgtaaaggaaccatcatggacaatatgcacttttttgattcgcggctgtttggcgtccacatagtctctgagtgtttgaataaagttttgatattcctgttccatcttatattcatcaatcgctgcttctgtaatatctctcagctgcttatagtatgatccaagtcggaaggtctgaaaggagcgaatgtaaaatactccttcctctaaacagatcgtttggagttcatccaaaattgattgtttccgtgaaagcttcagcggctcaaacggaagatcgtctgcttcaccttcaataatactgtgtgcgagctgaaggatttgctgctgttcatcctggtccgtgaaacaataagtttcctcaatcaatgacagcatatgctcgtcttctttgcattccaaaaaaaatttgaccagaatcggctccataaaacgctgaataggaaaagccggattcgctttttcaatcccgatttttcgtatgccttcacggacaatgatattgttccgatcgtccgaatgctgaatgagatgtaaaaaagcggctgcatcatggtcatcttcaaagattatttcaagcatgtttgtccccccttacggcatctgttacaagtatatgggggatgtttttaaaatagacgtaaaggtcattggcaaatcttaatttgattcttggaacaagttttgcattttctttctgaagatgaacggcaatgagataaacacgatatacaaagcgagcaccataaagaaagcgggcagattgccagccaaaaagctcgcacccagcacattaagcgcaatcgtcccagggatgattcccacagccgttgcggcaaaatacggcagcgctttgacattggaaaggcctgccgcatagctgacgaaatcaaaattgatcggcaggattctcaaaagaaagatatagaaaaatccgttatcctccatttgcttctgtatggcttcaagcctttcgtaatgcccgttctttttcgccgaaaacaaaccagccgcaaaaaacgaaacagctgaagcgcacatcgaaccgaataacgtataaagcgtgccgagaagcgggccaaacgcaagtccgccagctattgaaataacagacaccggaaataaaacaagtggcctgacgatggatatcccgataaacatcagaggtgcaaagactccgaacgacaatacccataccctgatttctttcggcgatacattcaaatacgttttatttccccaatagagtaaaccagcacctgcaagcactgccagccatttgacagccgtttttcgtttcataccctcagttccttcccctttgaaccacagcaattatggatgtcggcggttttctccgtcaaggcggatcggagcagccaaatataatatccgctccattaatcttgcagcttttacttcttctttttctcccctctgcgaatacgtaaaatgatgcttcagctcgtcaggtgagaaattagaagaaaagaacgttggcagctgctgggacattctgtgctgaagcaccgttccgatgacctcatcccttacccagcttgtcattgattctgctccgatgtcatcaagcattaatacgggtgtggtctttaccatattgagcttctcttccaatgtctggtcttgcagcgaattcttaagctctctcacaaattcaggcacataaacaatcatggaggaatactctttttccgccagctcattggcaattgcagcgagcataaacgtttttcctaccccaaatttcccgtataaatataatcctttcccttttcccgtctcattatagcttttcaggaagtctgtaacatgctgaaacatcgcgagtctgcttgggtcactgatatcaacttgctggaacgtcgctccaagaagatcctgctggatatacatgcttttcataagagactgttgtttcttctgctggtcgagcttccgtttgactggacattcgtaatactcgatatcaatagacctcccattgacaacaagcttcggatggtagccctccaacaaattgttgcagttttcatcttccgaacaataggagcaattcttgctttgttcgatatattcataaagcttatttaagctcttttcgatcattttttggtcaatcacttcttcgttttccttcaaaaatgcttgaacatcttgatctttcatgactttttccttcatttgttcaagacgtttttggaaatccggcctgccggttacgccctgcagggaacggccgattggttccatctattccttcaccccgcatctctgtctttaataggcagagtattttttcagtttttgcatttcttccatcatctttttcttctgttcttccaaatcctgcggatgcagcttctgctgtccggattctgaatcggacgctgtttccttttctgtcatccaatcaggaagcttttcttcacgaatcactttttggtttcgtttcgaagactttgtttttccctcagcccattcaagatactggcggttttcttctattgcgagcttcatcgcttccctgaccgttttcacctttttgcgtgcccaatgcgaagcgattttttggatatagtttttcgacagcttcatgtcggttttcagcatgacataataaattaacacatttgtgacgcctggctcgagcttctgttcgaacataatttcttctatgatcttcagatcagcttttgacggctctgttccgtcagcaatgtcctgcagaagcttcttcggggaaatcgcctccagcaatgcaatcagcttcccatccagagaatcctcttctgccggtttttcgccttcacgcagatgcaccggctgtgttttttccaccaaatcgggcagctgtccgtttctttcaatttgataccagtcgctcgccgcttttcttaatgcctccgtcgtaatgacgtcacgctcatcaattgcgctcatcacaacattttgcatttgcaaagggtcaattccgtacagataagaaagctttttgattgtgtcccgcacctgctgggtcatcgcttttctcggtatcatcgtctcagaaagtcccgctaaaaacaaatcaaaatcaaacacatcctccgttatggtgtaggacggagactgtccgacagaagtatactcggacccctcggcaagccttaccgtttcctccatatcggatgtgagcttccattcactcggctgcagcgattcaaacgcatgattaaacggacgcgtaatgtccttcgcatcttctgaaatggccgggtgcgtaaaaaattgttttaattgctgatatttcgtttttccgaccctattatacagaaaaacattcagcattccgtcttcaaaaaattcatttggtctgagcggcggaaggagttcatatataaagaggcgctcctgccgctcggattctttcatatatactttcagcaatccgatgccctcgagcttcccctgttcctgatggatcgtttttaagttggactgtgtcatcgccatcagctgtctatgtgtggactctccgccccacagacggttttgttcaagctctccccacaatgtcatataaagagagaatgcaacagggccgattaagggctggtacagttgtgtaataatttgtctgtcaatatcctgcagcatcgatctgcttttaaccacatacgggtctacaggcagtacatctttccaatagtcagccatacattctcaaaccttccgaatttgtttctacctttcattttacaccgtttcttatatctatcaaatgccaattttgcacatgagaaaagagctagaagaatcctcttagctcttttaacgctctttctttattaagtcttttaattcatcgataaagacgtttatatctttaaactgccgatagacggacgcgaaccgcacatatgcgacttcgtcaatcttagccagccggtccatgaccatttctccgacgagctcactcttcacctcggagcagccttgattgcgaagttctttttcaatatcaaagcacatgtcttcaagcgttttgagtgaaacaggccttttttcacatgcttttatgaggccgcgcagcattttttctctgctgaattcctcacgcacaccttcttttttcacaacgatgagcggggtttcctccactttctcaaaggtcgtaaaccggtagtggcaggattcgcactcgcgtcttcggcgaatcgactttccgtcatccacaggccgtgaatcaaggactcgtgttccgttatgctggcatgaaggacatttcaataaaatcagctcccaactatatcgttccctgcaatgtattttcggcagcctccgccttttaaaaatagatgtgacagcatctgtcgggagagccgttgttaaatttgtttctatagcattaggtggtttgtgaaaatctccttcttattttacaaaaaaaatgaaaaaagaaaaagctgacactctcgtttctttataaaaataaaaggagcataagctaaaaagcgcataatggctttctagcttcagctccctttgtgttcgcaatttactttatagtactttcgcttgcgcctgtttaatttgcacaggccccattcctcttggtatttcaatgttttctcttgtatcagcatgtaatgcctctgcaatgtaatcagcagcgacattaggatctaagtctccacaagtataaacatcaatgctcgcatatccgtgctcaggaaaactgtgaatcgttaagtgtgattcagaaataatcacaactccgcttacgccttgcggtgcaaatttgtgaaatgcaacctcgcgcacctcagcacctgattttagagcagcatttacaaacgttttttcaataaaatccatgtcattcagcttatcaaaatcgcatccccatagctcggagataacgtgacgccccattgtttccatagtcatggacccccttaacaagaattaaaaagtgaaattccaacaactgggtcggccatttaccacgggggaaagttagtccggagaggtcctaaccctttaagtaattccgaaacagtctcaagcaagaagttcacgaaaaatagtatactgtgtttaagtctaatttgcaaggtgcgttttttcagaaatatgctgttaagggttttttctttaaaatgtgtccatgaccttattttatacagcagacggatgtttcattcgtgccgctacatggcggattagatcaacaactctgcaggagtagccccattcgttgtcataccacgccagcacctttactttcctgtcttccattaccattgttgtaagcccgtcaatgaccgctgaatgcggattcgtattataatcagtcgaaacgagcggttcatctgagtaatcaagtacaccgtacatcgacgttttggcagcgcgtttaaatgcctcgtttacttcttcagccgtaacatccgttttcagatcaacaacgagatcaaccaatgagacgttcggaacagggacacgcaaggcgaggccgtgaagttttcctttcagatgcggcagcacaagcgaaagcgcctttgccgctcctgttgttgttggaatgatggattcaccgcaagcccgcgcccggcgcaaatctttgtgcgggttatcaatatttttttggtcattcgtatacgcatgaactgtagtcatcagaccgctctcaatgccaaactcttcatccagtacttttacaacaggcgcaaggcaatttgtcgtgcatgacgcatttgaaataatgacatggcgctcagcgtcgaattggtcctcatttacgcccatcacaatggtaacgtcttcattttttcccggagcggtcaaaatcactttttttgcacctgcttctatatggcccatcgctttatctttagcattaaacttccctgttgcttcgacgactatgtcaatatcatattcccgccaaggcagctgttttggatcacggctgtttaacaaaagcactttctttccatttacgatcaggctgtcttcaccagccacaacctctttgtcgtatctgccgtgaattgtgtcatactttattaaatgagccagcgtttctgcggaatagctggcgttaatggccactacttgaatttgatcgtctaacatcgcttttctaaaaaccattcttccgattcttccaaacccgttgatcgctacttttaccttcatgttggacaccccttatcaattatgccatcctaatttgttactatctaaaattagtataacacattaaaacaaattcgccagtacatattgataaaaatcaacgattataacgctaatttatgatgcatcttatgttttcttgcacagaatatcaggcgtaagaaccaaaaagcagccagcgctccgcactgactgccctcatgctttatgattcctgttttaacttatcattgagcacactttcttctagcacagaaaatgtatccccgtatactctgttaatatgattcgctccccaagcacacagcatatctaaaattccttctaagctgcggccgtattcgctgagctcatattccactttgggaggaacttgattatatacgattcggttaatgacaccgtccgcttccagctcgcgcagctgctgagtcagcattttttgcgtgatattgggcattaggcgttttaattcgcttgtacgtttttttccgtgcgtcagatggcataaaatgacgcatttccatttccctccaatcacttcaagagtcgcttcaacagaaatgttatattttttcttctccatacaatccattctcctcacaggcaccaaaaagtgactatagcacttcaaagtacgtacttttatttcttaacgatatgtttcataatcacatttgccggctgatttgaatctgctcttttttatttatatagcttactcggcagaatttcaatcatacaacacatcttacaaaggaggaacatcatgacttcagccaaaagcagtattcctgcactactggctttggccgtaagtgcattcgcaatagggacaactgaatttatcagtgtcggccttttgccgctcattgctgatgacctgcatattccagtcacgacagcaggattaaccgtttccctttatgcgctcggcgttacatttggggcacctatattaacttcattgacctcaagcatgtcgcgtaagacactattgctttggatcatgtttatttttattgccggtaatacgatggcagcaaccgcttcaagcatcgggattttactagcagcacgtgtgatatcggcattttcgcacggtgtgtttatgtcgatcggttcgacaatcgcagcggatattgtcccggaagataaaagggctagcgcgatttcaattatgtttactggcctcactgtggcaactgtaaccggagttccttttgggacatttatcggccagcagttcggctggcgtttcgcctttatggtcattatcgccgtcggaatcattgctttcattacaaatggtattcttgtaccgtccaaattacgaaaagggacgaaaacaacgatgcgggatcaattgaagcttgtgacaaacagccggttattgcttttatttgtcattacagcgcttggatacggaggaacattcgttgtgttcacgtatctgtctcccctgcttcaggaagtaacaggcttcaaagccgggactgttgcagtgattctgctcggatacggaatagctattgctatcggcaatatgattggcggaaagctgtcaaaccgaaatccgattgccgctttattctatatgtttatcgtacaagcaattgttctattcgtactgacatttacagccccgtatcaaacagcagggctcattaccattctctgtatgggattgctggcctttatgaacgtgcccggccttcaggtgtatgtcgtcatgctggctgagcgttttgtcccgagtgcagttgacgtcgcatccgcgatgaatatcgctgcctttaatgcaggaatcgcgcttgggtcataccttggcggtgtgatcaccgattcaatcggattgattcataccgcttggataggcggattaatggtggtcggtgcagtcattttaacaggctggagccgcttaatggaaaaacgagatcggcaggaagcctgacaattttaaaggaggaaatgaacatgacaacacatttacaagcaaaagcaacacttcataatggggtagaaatgccttggttcggcctcggcgtgttccaagtggaagaaggatctgaactggtaaacgcagttaaaactgccattgttcacgggtaccgcagtattgatactgcagctatctatggaaatgaagctggcgttggagaagggattcgggaaggcattgaagaagcaggcatttcaagagaggatctgtttatcacatcgaaagtatggaatgcggatttaggctacgaagaaacactcgccgcgtttgaaacaagcctatccaaactcggtctggattatttggatctatacctcatccactggcctgtagaaggaaagtataaagaagcttggagagcgcttgaaacgctgtataaagaaggccgtatcaaagcgattggcgtaagcaacttccaaattcaccatcttgaagatctgatgacggcagctgaaattaagcctatgattaaccaagtggaatttcacccgcgcctcacacaaaaagagttgataagatactgccaaaatcagggcatccagatggaggcttggtcacctttaatgcaggggcagctgctggatcaccctgtattggctgacatcgctcaaacatacaataaatctgtcgcacaaattattttgcgctgggatctgcagcatggcatcattacgattcctaaatcaacgaaggaacaccgcattaaagaaaatgcaagcgtatttgactttgaattaacgcaggatgacatgaaccgaatcgatgcactgaatgaaaacttgcgagtcggtcctgatccggacaactttgatttttaatggcaaaaaaacaccgttcaatatgaacggtgttttttgtattatgcccagctgttcatgatttcatcaagctgccttttggtctcttcaagcgtgccgctgttatcaatgacttgatctgctcttgctgttttttcctctaagggcatttgagagcggatacggctgactgcttcttcttccgtcagctgattgcgcttcatcagacgttccagttgaagctcttttgtcacactgaccacaataattttatcaaccaatgattccaatttgctttcgaacaatagcgggatatccaatacaacaaatgcctcccgatttgcaacggcttcatcacggcgattgagcatttcctgcctgactgcgggatgaacaattgcatttaaagcgagacgcttttgttcatttgtaaataccagcgctccaagcttttttctatctatatcgccatttgagagcagtatgtcttcaccgaattcgtcaatgatttgccggtaggccggcatccctttttctaccgcttgttttgcaatgatatctgcatctataactgttattcctttttcaatcagcatattggctaccgtgcttttgccgctagctattcctcccgttaaaccaatgactaaggtcaagagatccactcctttttacaatttccagagcccaatcgtgattaacagaagccccggcaaaaacgccattttatcgatccatttccacttagacagaaaatggccggcattggttccaattgatacaaacagcgagctcatgattgccacggcgatgctcatcacaatcggtgaaaaaccgagaatggctgcgcctatgcctgctccaaaggcatcaattgataaggcaaatcccaataagaccgcctcaattccattgatcacacccgatttgtcgatatccgcactcatgggttttctcaaaatatgaatcacaatccctaatgaccgaacctctaaattaagcagcgttttttcatgcaataggtattctttatcttttgccggtttgaagaattggtacagaacccacgcaccgattccaaccaatatcaaaccgccaagcttctccgtcacatatacaggaaaaaacttcgtgagaaagcttccgatcagcatggatataaacatgacagcaccggaacagcaggcgataaccaaaatcgctttaaacggtattttcatttttctcaatccgtacgtaaatccgactgaaaaactgtccaagctgacagccaacgccagcagcagtatagaaaccatttgcatatccgtttcttcctttctgttggtgctcttgtatcagatgtgaaatgcccgggattcatcacaatcatatatatgggaaagtgaaaaatccgtgtttcgaaaatggcatcctccattacagagttactgatatatgcaccgacagcttggacgatgaagcattatgctacttttttttctggcactttgcgcaaaaatgcgtgcctcttcctccaacgacaattttcgaaatcatcgttccgcaatttttgcatggctcgtctttttttccgtacacaaaatgctgcagctggaacattccgatttccccttgggagttgatatatgaacggactgtgcttccgcccgcatcaatcgcctcctgcagagtgtttttgatttcagcgtgaagggttttgattgttttatctgataattgatttgcttttatctcgggatgaacacccgctctgaaaagagcctcatccacataaatgtttcctagtccaactaccgttttttgatccagtagggcagttttgacagcgcggtttgttttcgcaagccgttcttttaaatacgcactcgtaaattcttctgcatccggctccggacctaactgagaaagcgggagctcgcccgcttcttctcccggtttaaataagtgcatggttccaaatttccgcacatccctgtaccggagctgggttccatccgtcatcgtgaatatgacatgcacgtgtttatcgtcaggctcctcggcttgatgaagaccgtattttccttccattcgaaggtgagaaaccataacataatgatctaaatgaaacagtaaaaactttccccgtcttccgatggactgtatcgtttctcctgctagttttcgcgcaaattcctccggttcggcaggccgtttgatgatattcggccatctgatctctaccgatttgattgtttttccctttacaagcccggtcagagtgcgccggaccgtctcaacttctggtaattccggcacatccatcacttcctatctctgtttatttcgcatcgtaccaagatgggcctgatgcaaagtccacctttaacggcacatctaatgcaagcgcatgctccatcacttcaggaacaagcttttcaagaatttcaatttcttcctttggcgcctcaaaaatcaattcatcgtgtacttgaagcagaagccttgctttcaactgtttttctttcagcttggcagccatgtcaatcatggcttttttgataatatcagcggcgcttccttgaatcggcgtattcatggccgtccgctctgcaaaacttcggatattaaagttccggctcgtcagctcagggatgtagcggcggcgatgcataagcgttgttacgtatcctttttgcttcgcttcctgtactgaatcttccatgtacgcttttacgccttggaagctttccagatagcggtcgataaatgctcccgcttccttccgggtaatgccgaggttctgtgacagaccgtaatcgctgatcccgtaaacaatgccaaagttgaccgctttcgcctggcgtctcatcgcagatgtcacttcatccttagcgacatggaacacatccattgccgttttcgtgtgaatatccatatcatttgtaaaagcttcgatcagattatcatcctttgaaatatgggcaagcacccgcagctcgatttgtgaataatcggctgcaaaaatgagccagtctttttcagacggcacaaaagcttggcgaattttccgcccttcctcaagcctgatcggaatgttttgcaggttcggatcagtcgagctgagacgaccagtttgcgttaaggcctggttaaatcgcgtgtgcactttatgcgaatccggtctcgtcacctttaaaagcccttcgatatatgttgattgaagcttgccaatttgtctgtactgtaaaatatagtcgacaatatcatgcttgtcagccagcttttcaagcacatcggcagacgtagaatagcctgttttcgttttctttacgacaggaaggccgatcttttcaaataagatgacgcctagctgtttcggagaattgatgttaaacggctctcccgcaatctcatggattttttcttcatattccttcagcttcgcacccagttcttcacccatccgttttaaacggtcaacatcgactttgacgccagttgattccatttcgccgagaataagcgcaagaggcatttccagctcttcaaacagttcaagctggtcgttgttttccagctcctgaacgagcttttcccgaaggctttgaatcgctaacgctttgcggccaaggtgctcagacagtacgtcttctgacggcactgctcgttttgctccttttccataaactgattcatcacttgaaacgatatgcaagccgtaatccttagccacactcgcaacgtcgtcatatgaattgcccgggttgatgatataagccgcaaggagcgtatcaaactcggctcctttcagctcaatgccctgccagcgcaaagcgacaacagcccgcttgctgtcgaagacccatttcttctgctcgtcattttccacccattctttaaacacctcagactcaacggcagtgtctttcggaatgaaataagctcccttttcatttacgatcgaaaatccgagaatcggctcttcatgataattatcgccaatctgttcaacgacaaatgcggatggagaaaccaatatatcgcttgtcacgtctgtgactgttttgacattaatgtcttccaacgattgatcctgttctgcttctgcactgtcttctccaagccgttcaagaagcgtgttgaagccaagatctttaaagatggcaatgacctgttcacgattaaagccttgatattccaggccggaaacagatacctcaatcggagcatccgtcataattgtcgcaagctccttgctcatcaatgcttgatccttaaactcctcaagcttttccttcaatttctttccgctcacctcgtcaatggactccagcagcttttcaacggaatcaaattgttttaaaagcttaatcgcagtcttttctccgacgccgggcacacccggaatattatctgaggaatcgcccatcagacccttcatgtcaatgatttgttcaggcgtaagcccgtatttctctttgacatgctccggtgtgtaaaattcaacatcggtaattccctttctcgtaatggcaactgtcgttttgtccgttgccagctgtgttaaatccttatctcctgagaaaaccttaacttcaaatccgtctttttcagccgatttggccagtgtgccgataatatcatccgcttcatattgttccagttcatagcggctgatctggtaggcatccagcagctcgcggataaacggcatttgttcggaaagctcaggcggggttttctgtctgccgcctttatattctttaaatgtgccgtgacgaaatgttgttttcccggcatcaaacgcaaccagcatgtgcgtcggtttttcatcctcaagcattttcatcaaaatcatcgcaaagccgtatacggcatttgtatgaacacctttatcattgcttaacagcggcaatgcaaaaaacgcccggtaagccagactgtttccgtctacaagcactaatttttttcgttccgtcattcaatttcctcctaagaagcctcaggcttccattcatctcttacatagtcattagctcctcttattttaacaaagttcaatttgaaaggaaaatacgtgaactataagagaagacacaaaaaaggacgggaacacaaataggttcccgccgtcaaaattggctccttggatgaaggggttctactacatcctaccagcataggtttaacagtgcatgaagatattgttaaacctttgtaaacattaggcggacttttcagcggcccgtttcagcgtcacggtaaagacagttccccgtccaggctcgcttgtgacatcaattttcccttcatgagcctctattaaatgcttgacaatcgcaaggcccagtccggttccgcccgaattcctgcttctgtctttatctacgcggtaaaagcgttcaaagatgcgcggaatttcttctttctgaattccgattccagaatcagcaacctcaatctgaatgtctttttctctgggctttacattgatagccacggagcccccctcaggcgtgtaggttaacgcattgtttacgagattaagaaatacctgtttcagcctgtacgggtcaccagatacatattgagggtctttcggggcattcagttgcaaggagatgcctttctcatccgccttatgcttcagaagcgtttcaatctcaccaagcattttggccggctcaaacgtttcgatactgagcgtgaaattttgctgctcgatttttgagagatcgagcaaatcctgaaccaaagactgaagcctttcgctttccttaagaataatagagagaaattcagaaagcgcctctttgtcttccatcgccccatccaataacgtctccgtaaacccttttatggacgtaatcggtgttttcagctcatgagaaacattggccacaaaatccttcctcatctgctctaatttctttgtttccgtcatgtcatggaaaacgagcacaattcctttccattcatcgtccggccccataatcggaacgccgtccacttcaaaataacgccgttctattttgatcggaagtcttaacagcttgcatttctttgtctccgtcataaaaatgtcttcgacaagctggatcacttcttcatgttcaaatgcatcgtgataaagacggcgcagcatatgattcggattgatatgaaactgcttggcgtaagatctgtttacgagattaataaagcctcttccgtcgatcataatcagcccggagccaatgttttcaatgactgtcagcagccgatcccgctgcatttcctgcgttcgcgtcatttccatcagatcaatggcaaggctgttcatcgcatgtcctagcttatcagaacgcctaatatagccgccgtacgtccgtgcatcgtagttgcccttagagagttctgtggctacatttgtcgctgactcaattgaccttttataacgtgaggtcatgctggaataaaaataaacaatgacgataaatgcggtacaaagactggccgtcagcatcccccacaattcgccttttaagccgtcgcttttttcagaggcggaaagcagcacatatcctgttttttccccttcgcttctaagtgaaagtccgtaataaagcttgttatctgttgttgacagaataccctcatggccagaaacaagcgcctgcaccttttgggaatcagccgctctcccgttagacccatacagcaccttgccgtctgtatcgataacggatgcgctcacatcaagcgcgccgcctgcatctttaatgattttctcatttgtttgattattcagattgccggcatcaagaagcgaagccaagtattttgcttctttttcaatgtgttcctctgctttcctttgatcagatgtttcaaaaagctgctgtaaaaacagcccgagaacacaaaacaccagaatcatacagacaacgaatacagaaaaaaggcgcacacggtatttattcattcatttttggctcctccagtttataccccaatcccctaatcgttttaatgtagatcggttttttggtattgttttcaattttgtcgcgaagatggctgatgtgcacatcaacaattctcgtatctccggcaaaatcataattccagactgcgctcagcagcagatctcttgtcagaactctgcctttatgtctgcctaaatagagcagcagttcgaattctttcggtgttagttcaagctgactttctttaaagtacgcttcataatgatcaggcaggattttcagatcgccgattacgatctggccttccatttcatcgttcttcatctcactagagggcgcagctatttccgaacgccttaaaatcgctttgactctcgcatttacttctcttggactgaacggcttggtcatataatcatcagcaccgagctcaagccctaatactttgtcgaattcctcatccttcgctgtcagcattaaaatgggaaacatcagtttttgctgtctcagctgcttgcatacttcgattccgtccaattttggaagcatcacatcaagcacaatcaaatcaggcttctctgtttccgcttttttgagtgcttcttccccatccgaggcggtaatgacatcatagcctgaccgttccaaattgtactgtaaaagagtaacaatagattcttcatcatccacaactaaaattttcttgttcatgctgtgcctccagtattataattccccgacatcctatttctctattttatgtcatcttaacatgtttcatgattttattttagcgaaagcaggacattccgacaattcgccttttacatcatttttaaaagaaataaagacgtttatgataacgctttcatttatagtaaaaagagaaaggctgtattaagcaagcctttctctctttttattaggataatactttcatgacatttttgacagattcaactgatttattcagctgcgctctttcatagtctgtcagttcaagttcaatgatttgctcaagaccgttgccgcctacaattgtaggaacaccaaggtagatgccttcatagccgtattccccttcaagataagcaattgtaggaaggacgcggcgctgatccttcaagatcgcttcgaccatttctgtcagagaagccgcaggcgcataatacgcgcttccgtttccaagaagattcacgatttcgcctccgccttttctagtgcgctccacaattgcgtcaatccgttctttcggaataagagtttcaagcgggataccgccagcataagaataacgcacaagcggcaccatatcgtcaccgtgtccgccgagtacgaaaccagtcacatctttcactgacaggtttaattcctctgccacaaatgttctgaatcttgccgtatcaagcacaccggactggccgattacacgctctttagggaagcctgattctttgtacaccgcgtatgtcattgcatcaacaggatttgtcagcaccacaataatagagtcaggagaatatttcacgatttcccgcgtaacgcttctcataatcttttcgtttgtagagaccagatcatctctgctcataccaggttttcttgcgataccggctgtaatgacaacaatgtcagagccggctgtatcctcgtaattggatgttcccgtaatttttgcgtcaaagccttgaaccgggcttgcttcaagcatatcaagcgcttttccctttgtcgggttctccaattgcggaatgtcaacaagaacaacgtctgccagctctttttgagcgattaaaaatgcagttgtagctccggtaaaacctgctccgataacagaaacttttttacgagtatttcccatgtctctcttctcctttatggctagttttaggctttttccttgcttagtccatgtttttgatcagttcttctccgaactctgaacatttcacttcagtcgcgccatccattaatctagcaaaatcgtaagttacgactttggaagcgattgttttttccatagatttgataaccaaatcagccgcttcgttccatcctaaatgctcaagaagcagaacgcctgaaagaataactgaagatgggtttactttatcaaggcctgcatatttaggagccgttccgtgcgtcgcctcgaaaatcgcatgtcctgtttcgtagttgatgttcgctccaggagcaatgccgattccgccgacttgcgcagcaagagcatcagaaatgtaatctccgttcaagttcattgtcgcaacgacatcaaactcgtttggacgcgttaagatctgctgaaggaaaatgtcagcaatgctgtctttgataatgatttttcctgctgcttccgcttcgctttgcgctttgttggcagcgtcttttccttcttcttcagcaatgcggtcatattgagcccatgtgaagactttatctccgtattctttttcagcaagttcatagccccagtttttgaaggcgccttctgtgaacttcatgatgtttcctttgtgaacaagtgttacagatttgcggccatgctcgatcgcataatcaatggcagctctgaccaagcggcttgttccttcttctgaaacaggcttaatgccgatacctgatgtctcagggaaacggattttattgacgtttaactcattttgaaggaagctgataagcttttgcacttcttcagagccttttgcatactcgatgcctgcgtaaatatcttctgtattttcacggaagatgaccatatcagtatcttcagggcgttttaccggtgacggcactccagtaaagtatcttacaggtcttaagcagacgaataggtcaagctcttgtctgagcgctacgttcaaagaacggataccgccgccgacaggtgtcgttaacgggcctttaatcgcgatgaaatattcgcggatcacatctaatgtttcagcagggagccactcacctgttttattataagccttttctccggcgtaaacttctttccatgtaattttcttttcgcctttgtatgctttttctactgctgcttccaaaaccttcgaagccgcgttccaaatatcaggaccggttccgtctccttcgataaatgggataatcgggttgtttggtacgtttaatactccgttagagactgtaattttttcaccttgtgccacaataaaaacctcccagtatgtaattcatatttagaaaacattttatttttcttatatagaaaataaaatgatttttcctaacattcaatttaaagtgtaacccaattttgatgttctgaacaagaggctaacctcattgacgcaagccagcctccaatggttctttaggctctttcttcaatcggaacgaatttttgtttgtcagggcctgtgtaatctgcccgcgggcggatcagacggttgttgtcatactgctcaagaatatgagcgagccagccggacattctgcttacagcaaaaatcggtgtaaacaaatcatggtcaataccgaggctgtgatatacagaagccgaatagaaatcaacgttaggcggaagctttttctctgatgtgacgatgtcttctatacgaatcgacatctcataccatttgctttcgcctgtcaggttggtcaggcgcttgctcatttctttcagatgcttcgcgcgcggatcaccatgcttatacacacggtggccgaatcccatgattttttctttcttttcaagtttagcgcggatgtacggctcagcgttttccacttcaccgatttctgtcagcattttcataacgccttcattcgctccgccgtgaagaggccctttcagcgcgccgattgctgcagtaatgcctgaatagatgtcagaaagtgttgcgacgcagaccctcgctgtgaacgttgacgcgttcagctcatggtcagcatgtaaaatcaatgctttgttgaaggcttcaacttcaattggtgaaggctcttcaccgtttaatgtgtaaagaaaattctccgcaataccgtaatcttctctcggttcaacaggctcaagacccttgcgaattctggaaaacgctgcaaccaggccaggcacctttgcctgaaggcggatcgcctttctgtagttggcttccgggttcatggtatcagcctcgctgtcaagcaggcctagtaatgaaattgctgtccgaagagcagccatgggatgaacattttcgagggaataagatttgaagtgctcaataatttcttgcggaacggcagcttcctttgcaagctgctgctttaactcttcaagctcttttttgtttggcagccttagatgccaaagcaagtagatgatttcttcaaaacttgcattctctgtcaaatcatcgatatcataccccacatatgtaagggtatcatcaataatagaactaacagatgatgttgttgctacaaccccttcaagaccgcgtgtcgctgtcatatataacatctccttttcaataaatttcccctttaagagtgttgtaaaaacatgaggcttacttaaaaagcacgatgcaagtatttctctcccccaaaaagaaaatgcttacattttactggctgctggaactaaaaccctttgcttatgaaagaacataacaaattcttataagcttatttaagtttaagcctattctcattataaacaataatcagacatttgttaaatgtttacctataattttttttttcattctgtgatttccccgaaaaaacgcctttatttgcgggtttttgcataaaaaaaaagcggctttaaggccgcttttttttatgaagtgaacagttttacgatctgcatggctaaataagcaatccccgctccgatcagcggccccaccgcaactcctccaaaaagcgcgactgcaagaatggtcccgatcacgagagcagttgtaatatgcggatcattttcaagcagggccaggccgttttttgcaatcagcgccactgcgatccccgctccaagggcgatccatgcgtaggaagaccgcattgcttctccaagctgcttaaatccgatttctcccgtggcaatcgggacaagaacggcgatggtaataatggtcacaccccagttaatgccttttgactggatggtcggaaataatttctgatcaagcccaacgattttgatgatcaaaaggacggatacagcaaagagcaatgattggttttttgcgataagtgcgatagccaagagtaaaattaaaaataaattcgcttgtgtaaacacatgccatccctcctttaagatgaatgtattcatattcagccgcagcgtgaatacatataaaaaataggacatgctgacgagaggaggaccgttttcgtgaatcaatcttatatcactatttttttcagaaccctctttgtcatatcaatgaccgcagggtcgatagctgcggcctattattcgtttccgttaacttatccgttcctgatcgcccttattctttcttcagtgattcatcctgttgtcgattatttggacaaagtgacaggattcccccgaacgataaatgttctgggcgttcttgctttttttctgctcgcagccttcggcgtcctcaccattctggtagccgaaatcgtaacgggaacagcctatctagcaaaaacgctgcctccgcatatcagcacgtttatttcatattgcgaaaaattgtttaccactcatattcagccgctctataacgagttaactcttttgtttcaagaattggaaacgaaccagcaggcttccatcgtcactcatatccagacactcggtgattctgccgctaaaaatgccgggctcctgctgtcccacattctagagatgatcccgagatttttcgctcttcttcccaatacggcggcggttctgattttttctcttctggcaaccttttttatgacaaaggattggcataagctgaaagccatgcttgttttaattctgccggatcgtgtgacagctaacagcaaagcaatcagcagcgaattaaaaaaagcaatgactggttttatcaaagcacaagccgtcctcgttttcatcacgatggtgattgtatttatcggcctttctctcttaaaggttgaacacgccgcaacaattgcttttttaatcgggcttgtagatcttctcccttacttaggtgccggctccgtatttgtgccctggattttgtatttatcgattacgggccagctgccccaagcaatcggaattggtatcctgtacctcgtcgttcttattcagcggcagctgacagagcccaagatactaagtaaatctatcgggatcgatccgctggcaacactcatcgccctgtttgccggctttaaattattcgggtttttaggactgattgcgggaccggctgtactcgtcatcatccaagctttcatcacaacaggcgcattaaaagaaatatggtcctatatcaccgttcagcaaaaataaaacggcagccgttttttcatggctgccgttttttatttgatgatgatccgcttattcttcgacattcctctcagccatttgaacagaatcggcttacaccagccgcgggtaaacgggataagaagacaggcgccggccaaatctgataaaaagcccggaagcatcagcaatagaccgccaatgaaaatgcacagaccgtcagcaatcgcttctcccggcattttgccatattgaagatcacgctgaaccttataatacacttcggttccttgtttttttgcagctgctgcgccgataatgccagtcagaatcatgaatagaactgtcggcaaaataccaatcagctttcctaaaaataggaatataccgatttctattgccggaaacacaataaaaagcaaaaacaaaaatctcatatccaagccccccacacgtgtaacacgttctgttcaacaaaaggcatgataaagagaaaaggaagggattccccttccattttcacctgtaattaaagaacgctcgcacggccttgatagactgcgcctctggaagcgtcaactgtaatatcctggccatctgtcaaaatagatgtcgcattttccagacccacgataaccgggatgccaaggcttaatccgactaccgcagcatggctagtcaaaccgccttcttctgtaataagagcagacgctttttcaagggatgcaatcatatcacggtcagtgcttttggtaacaagtaccgcaccgtcagtcattttttgctcagcttcttttgcattttgtgcaacgacaaccggaccgtaagctgatttgcgtccaatgccttggcctttagcgatgatatcgccgacagtatgaaccttcattaagttcgtagtgccggactcaccgacagtgccagctgtaataacgataagatcgccgtgttttacaattccgctgttcaatgatttttggacagcatcctcaagcatctcatctgttgagctcgcattttggccgctttccgcgaatacgccagatacgagggcaagctttctggaaatagagtcatttacagtaaccgcaacaatcggagcctgcggacggtattttgcaatcatacgtgctgtatggccgctttctgtcggcgttacgatcgcagcagcattcaggttaatcgcagtatgtgcgacagattgtccaattgcgtctgtaattgtcatgcccacttggtctctgcgttttgagagaatttctttataatttaatgcttcttcagaacgggacgcgatgttatgcattgtttgaactgcttcaaccgggtaacttccggcagcagtttcaccagaaagcatgatcgcatctgttccgtcgaagatcgcgtttgcaacgtcacttgcttccgcacgagtcggacgcgggttgcgctgcatgctgtcaagcatttgtgtcgctgtaataacaggtttgcccagcgcgttgcattttttgatcagttctttttgcacaagcggcacttcttcagctggaatttccacacctaagtctccgcgcgcaaccattaagccgtcagacacttcgagaatcgcatcgatgttgtcaacgccctcttggttttcgattttagggatgatttgaatatcctgagcgttgtgctcttcaagaagctcacggatttcgagcacatccgtagaacgtcgaatgaaagatggtgcgatgaagtctactccttgctcaataccgaaaacgatgtctcgcgcatccttttcagtaatacccggaagattgacacttacgcccggtacgttaacaccttttttatttttgagtgttccgttgtttaatacttttgttttgatttcgcgtttagcggcatctacatcaagtacctcaagaccgataaggccgtcatctaacagaatcgttgaaccttgttcaacgtcatggactaaaccttcatatgtcactgaaattttatctgttgttcctacaacctcgtccattgaaataatgagctctttgcctgtttcaagctcaataccgccgttttccattgtatgtgtgcggatttcaggaccttttgtatcaagcagaattccaacgttcttgccaagttttttacttgcttcgcggatatttttaattcttgcaccgtgctcctcaaaatctccgtgagaaaagtttaatcgagccacgttcattcctgactccattaatttcgtaagcatttcaatactttcacttgccggaccgatggtacaaacaattttagtttttctcatttggttcacttccttctgaaatcttcagccttcatctgcacattagatagacagttcttttgaaagctgatacatgttttgctcaactgtgtgttttgtctcaagtatttctataatatcatggtctacaagcttattgttttgtatacctacacagcgtccgccttttccttcaagcagcagttcaactgcatatgcgccgagacggcttgccaacacacggtcagcagcactcggagaacctccgcgctggatatggcccaatacagataccctagtttcaagatttgtttcttcttcaatgcgtttcccgaattcaacaccgctgcctacaccttcggcaacaataataatactgtgcttcttgccgcgttcgtggccgcgttttaagcgggcaatgatttcgtgcatgtcatagtctgcctcagggattaagatcgattccgcgccccctgcaagaccggcccacaatgcgatatcgccggcatgacggcccattacttcgattacatatgtacgttcatgagaagtcgctgtatcgcgaatcttatcaattgcgtcaattactgtatttaaagctgtatcgaaaccgattgtaaaatcagtgcccggaatgtcattatcaattgtacccggtacacctacacatggaaacccgtgttccgttaattttttcgcacccatataggaaccgtctccgccgataacaacaaggccttcaataccaagcttcttcaagtttgctatccctttttcacggccttcaactgttttgaattcaggacatctcgccgtataaagcttagtccctccacgatgtataatatcgcctactgatccgagttcaagcttttcaatctttccgctgatcaatcccgcgtatccgttgtaaataccgtaaacttcaacgtcatgatagatcgcttttctgactactgcgcgaactgctgcgttcattcccggggaatccccgccgctcgttaatacccctatacgtttcattctccattcacctcagcaacatatatgattaaacataacatgatcattgccctaaaaacaatgaaaagggatctccatcctccctatgaaaccttacctattatacaattaaataaattgtttttaaataaaatttaaggaatgtcacaaaaaataaacgtgagccaaaggcttcacgtttatttagtttaccccgatatattgatcttcaaccgagactttgccaattgctttatatttttcatagcgctgctgaactaattcttcttcgctcagcttcagcaaagtttttaacgattgtttaagggtttcgtccatatagcttgcctgcagcttcacatcatggtgcgctccgccttttacttctttaatcatatgatctataatacctaattcttttaaatccggcgcagtgattttcattgtttctgctgcttttttagcaagactggagtccttccataaaagtgccgcggcaccttccggagaaataacagaataagtagagttttccagcatatgcaaatgattgcctacacccagaccaagggctccgccgcttccgccttcaccgatgacgatacagataacaggcactcgaaggccggccatctcaaacaggtttttggcaatagcttcactttgtcctctttcttcagctgctcgtccagggtatgcccccttcgtatcaataaaacagataattggtctgttaaatttgtcagcctgtttcatcagacgaagcgcttttctgtagccttcaggatgcggcatcccaaaattgcggactaggttttccttcgtgtctttgccgcgctgatgcccgattaccgttacagggaggccgtggaacttcgcaatcccgccgacaatggcttcatcgtccccgtacgctctgtctccgtgacattcaaaaaagtcggtaaacaggtgttcgatataatcaagagttgtcggacggtccgccagacgcgcgatttgaacccggtcccatggcttcagatttttgtaaatatcatcctgaagcttagcgagacggtcttcgagccgttcgatttccgcacttagatccatatcggaatcttgggtgaatttttttagttcggcgattttggtttgcagttcaatcaccggtttttcaaattctaatcttggagccactcaatgtcacctcctgtttgatgcatatccagcagattttctaacgtttttttcatatcgtcacgatgaataaccgcatcaagctgtccatgttttaataaaaattcagccgtttggaagtcctcaggcagtttttctcctattgtctgttcaataatccgtcttccggcaaaaccgatcagcgcgccaggctcagcgaaattgtaatcgccaagggatgcaaagcttgctgatacgcccccggtagtcggatgcgtcattactgaaataataagaccctgttcttcactgaacagttttaacgcagagcttgtcttagccatctgcatcaaacttaatacgccttcctgcattctagcgccgcctgaagccgtaaaaataataaacggaactttatcagcttttgctttttcaatcgcaagcgtgattttttcaccgacgactgaacccatgctgcccattctgaatgaagagtccatgacggcgactacagccgggtgtccgccgatggtgcccttgcctgtcacaacagcctcgtttaaggatgttttctcgcgatctttttcaagcttttccagatatcccgggaaaccaagcggattttccgagagcattccctgattgaattcctcaaaggatttttcatccatcaagctttcgatacgctgttttgcgttcattgggaaatgataatcgcagttcatgcatacccgcatatttttatccaactctttagtgagcatgatttttttacacttaggacattttgtcataatgccttccggaacatcgtgcttcgcttgatcagatggtacggaagcatactttttctttttcgtgaatatatcctttaacaaatgattacctcccttttgtgaagggttctcttcaccgcatgtcatcaaacagatagacttgctaataactttaccgaaactattgtactttttttgtcaaacgctgtcatcctcaattcgacaactttttattcgatgacgtgctcggaaaggcttgtatgaaatcagataaggtgttgaaacgacaaggttgacagcgcattcaaaaataatgttaaacccggctgaaatttttttaaggctaaccccctaaaaaaatttcagccgtcagtttaacttgagaacagcgcgccggtctccgccaacgcgctgccatttttggaatgaattaaaattattcaccaataatcgtaagttttcttgttttttctgcgacttcctcagggtcaacagtgattcttgcaacacctgtttccatcgcagcttttgccacagccttcgcaacagcaggcgcaacacgtttatcaaacggtgcagggatgacataatctgcgctaagctcatcttctgaaaccagtgaagcaatggcttcaaccgctgcgattttcatttcctcgttaatatgagtggcacgcacatcaagtgctccgcggaaaataccagggaatgcaagaacattgtttacttggttcgggaagtcagaacggccagttccgataacgcttgctccggcttcacgcgcatcttccggcatgatttccggatttggatttgccattgcaaagataatcggatcttttgccatgctttgaaccatttcttttgttaacgcgcctgctacagagacaccgataaatacgtcagcatcaacgatgacatctttcagagaaccgtctttgcgatcttggttcgtgaacttcgccacttcatttttgacatcgttcatgccgttcgggcgcccttcataaatggcccctttggaatcgcacatcacaatgtcgcgaacgccataatgatgaagaagcttgataatcgcaatgccagccgcacccgcgccgtttgcgacaactttaatggatgacatggattttccagacagtttcagcgcgttcacaagacctgctacggttacaatggcagtaccgtgctgatcatcatggaaaaccgggatgtttgtttcttttttgaggcgctcttcaatgataaagcagtttggcgctgcaatatcttcaaggttgacgccgccaaatgtcggttccagcaattttacagtttcaacgattttatcaacatcgtttgtgtttaaagcaatcgggaacgcatctacgcccgcaaagcttttgaaaagaactgctttcccttccataacaggaagcgccgcttcagggccgatgtttccaaggccaagcacagctgtaccgtcagttacaactgctaccatgttccccttcattgtataatcatatactttgttaatgtcttcatgaatatccttacacggttctgcaacacccggagaatacgcgaggcttaaatctttcgcatttctgacctctacttttgatttagactccagtttcccctggttgactttatgcaggtgtaatgcttcttctcttaatgacattctcctaaacactccttatggatattttttgattcgtatactgctgcgttgattgctgcattctgcggagtaaatctatctgaatatttaaacaggatcacataattgctccaattgtataacaaaaagcgaatcgttaccactgttttaaaacgacgtttttttgacccaacagctcttttaagcgatataacacctggtgatctgcattgatatggaacgactcaggtagcttaatcgtctgtttttgcctttcataatagagataaacgcctgtttcccctttatgctccagcaaaatgcgcttaatctttgccaggatctcctggctgtgctgactgctttctatttttatataaaccgatggcgctttttctgcatccatatcttctaataattctgcccgggacatgatgaattggatcttatcttgtctaacttcacatttccccgcagtgaacaaaagagcgccttctcttaaaacgggagaaagctgtctgaattgttcagggaagactacggcttctatctcgccggtttcatcactgagcgttaaaaacgccatgttttgacctgttttcgtccgaatcgttttgatcttcgacagcagaacgcctagtgaaagctgccttttgactgcccgctgagcctgcagaatagagactgctccttgcgcagtgagctgttttcggaaggcggagaggggatgatttgaaaaataaatgccaagcgtttccttttcaaacgcaagtaaatccaccagaggaagctcctccgtctccacatacttcggcttaattgaaaacgattcatctaaaaacaatcccatttggtcatcgtccgcggcgaatagctcagcatgttccaaagcaacatcaatggatgcgagcagcgtggcccggttttggccgaattcgtccatcgcaccagaaaagataagtgcttcaagcattttgcgatttacgctttttgacggcacgcgaaagcagaaatcgaaaagatcttcaaatggtttctcttttcttgctttatatatatctttgactgctgagacgcctacactttttatcgcgcggaggctgtatctgacagatccgttttcaactgtaaacggaaaactgcttttattcactgacggaggaaggatacgaatcccgctcccctttgcttcgtaaagatattgagagattttatcctcattgccaatgacgcttgtcagcaatccgcacataaaatataacggataatgagctttcaaatacgcaagctggcacccgatcatgctgtatgccaccgcatggcttctgttaaagccatagtttgcgaatttgacgattaaatcgtagacctcatttgcagtgtctacagaatactccttttttaagcacccttcaacaaaatggcttcgctctctgtccaggatttcttttttctttttgctgaccgcccttctcaataggtccgcttcgcctaaagaaaaccccgccatacgggaagcaatcatcataatttgttcctgatacacaatgacgccatatgtatcttccaaaatgctccttaaatcttcatgaggatagtgaacaggcgcccggccgtgtttacggtcgataaataacggaatattttccatcggacccggccggtacagtgcattgaccgccacaatatcttctaggcccgaaggtttcagccgtttcaagacgcttctcatccctgcagattcaagctggaaaatgcctgtcgtatccccttttgacagcaaggagaacgttttgtcatcgctgtaggaaatacttgaaaggtctattttaatattttcttctttttcaatcattgaagtgatggattcaataagtgtcagattcctcaaacctaagaaatccatttttaaaaggcccaagtcttcaagatggtccatcgcgtattgcgttaaatagatcccttcatgcccttcttgaagcggaacaacatctgttaacggttcttcactcaggacaacgcccgctgcgtgggttgatgcatgccttggcagcccttctattttccgggcaattgaatagacttgctgaagcaggcttgactcccgaagccgcttatccagctgcggtgactgctgtctcgcttcatccagcgtcattcccggtcttgaaggaatgagttttgcaagctgatctgcctccttcgggctgacgccgaatactctgccgacgtcccggagcgccgcctttgccgcaagtgttccaaaggtgataatctgtgcgacgtgcattgcaccgtatttctgctgaacatattgaatgacttcatcccttctagtatcgggaaagtcaatatcaatatccggcatgctgacgcgttcgggatttaaaaatctttcaaacagaaggtgatgcttaatcgggtcaacatctgtgatatacagcacgtatgccacaagagaacccgccgcagaaccccttcccggtcctgtaacaatccctttttcatgggcgtgcttcataaaatcccacacgatcagaaagtaatcgctgaacttcatccgcttgatgacatcaagctcatattgaagacggcgaaggtatcgttcatcaggcttgccgaaacggctgcggagtccctccatacagatatccgttaaataatcatcagcggacgttccgtctggggtcggaaaagacggtagacgggtctgcccgagactgacgtcaatgcggcattgttccgcgatctctacagaagcttgcagtgcctcgggatgctctcgataaatgttttgcatttcttcgtgtggtttcaaatcgagatcaggcaaatcttcagcgggtgcatccgtcagtttttcccccgctttaatcgctttcaaacaacggtaggcagccttatcttccttccttatgtaatgcacatcgcctgtggccgtaacagggatacccgtttcttctgacagctttagaatctgctcagacaagacttgattccctttaaaaggctgataggagaaataaaaagctccctttccgaatatagactgaaattccagcgaggcttgagcagcctgttcgaacagtcctccttcaagaagcgtttcaatatatcctttttcgccgggcgttattgcgataatcccttctcgataactgtgaagccatttcggcttcagtccgccttttgatttagattgcagaacgctgctgattttcagcaggttttgatagcctgtatttgattttgccagcaggacgagcgggtatgcttcaagttcgctgtcatctgtaaaaacagaagccgtcaaaccgattattgggttgatccctctcgtcttgcaagctttgtaaaattgaatagctccgtacatgacatgatcatctgtcagcgccaaagacgcatatccgagcctgtcagcttcactgacgagctcttccacagccgcggcgctgtttagcaggctatacccgctatgcacttgcaggtgaacaaaagacatgctatcacctctttctcattacgattcatttcttccctcattataaggccggtttccaaaagaaacaaatgttcttttttgactcatcatcatacttgtcctgaaagctcaatatgatataaaaggtgaggtgataaagatggatcaggaagcaggatttatggtgaattttatcaatagctacttcattgcgttaggggtgctgatcgggggcgcactcattggagggctcggagcatatttggcaggcgaacccccgcttacagccattacaaagcttgccaaccggttaaaaatatgggcgcttgtcgcagctatcggaggcacctttgatgcggtatacagctttgaacgcggcatactcgaaggcaatacgagagatatctttaaacagcttcttttaattatttcggccatggggggcgcgcaaagcggctggcttattatatcatggctgacccaggagcatctttcttcatgagggtcccccagcattacaaaaaaccgggatggcagcgttttttcgcgggaatgatgtgcggagccgtaatcagctggttctttttcctgtttacttacggaacattccaagaggagcaggtcagcctcatcgaaaagcaaaaagagcatgtaaaagacttgaacaatcaaatttcgatctatcaggaagacctccataaactgaatgaagataataaaagaaaactgctgattcaaagcgtcagcgtcaaattgctgaatggggataaatataaaatatcacagccggataaaacgaaattcgaggagcatgtaaaggatgatatttcagaggtgattacaaaagacatagagagcgtctatcaaacaaaggatctcttgaagcggacaattgaaaataaagtctatatgatcaatgaaaaaaaatacgaggcaaccgtcagagaattgattatttatacgaggctgacagtggaacttgaaatatctttcgccacataattatggatttttttcaaattctccaaacttctgtcgctttttcccattcttttttataaactatatgtgaggcttaatggcgaaaggaaggaggaagggaaatggaggtttacagtgaccgtcagttagcaaaagatcaagcagcccgtctcagacaaggtttttctgcatatgccgaaacaaactcactcgcttccctcatcaaaaaagaacttcaatcacacaatctccaagtctacgaggaccttactgatttcggctgctggttcatccccgtcacagatgaacactaagagagagggtctcccctctactcgtgttctttacataatgtttccagatcagctaaaatccgatcagcttcatcccagctgtaaatagaggcgcctgaagctaacggatgccctccgccgttatatttccgggcaagtccgttaatgacaggccccttcgaacggaatctgactctgatttgatcgtcttcttctacgaaaaacacccaggcgcgaatacctgagatattgccaagcgtcccgacaagctgtgacgcttcagaagccgttgtgccgaatttttcaagcgtatcctttttgatgaaaacagaagcggccccgttttcggacaaagacacattttgaaagataaagccgttaagcttcaccacattcagttttgtttcatacaattgattaaacaactctgaggaagagaatggatactgaatgagctcgcctgcatattttaatgttttttccgtggtattcggaaataaaaagcgtccggtatctccaacaatgccggcgtagatcagctctgccgctttcgtattcagcttccagccgtgctcttttccttctaaatacagctcgtaaatcatttcacttactgagctggcgcttgtatcgacccagagaaggtcaccgtatggatcttcgttcggatggtggtcgattttcattagtttggcgcctgaaggataacgctgatcgtctattctttcctgatttgccgtatcgcagacaatgacaagtgcgccttcatatgtttcattgtccacctcatcaagggaatataagaaagagagggacggttcaggcgtgccgaccgcaaaaatatttttttcaggatatgtttcacgcaggatttccgtaagcccgcactgtgatccgtaggcatccggatcaggacgcacatgtctatgtaagataatcgtgtcatataatgatatggttctgatcaattctgttttcatttgatactcctttattgtttttattcattaaatcacattctctgccgacggaaaagaaaaataacgtcaaaaccaagcccgtttttgtataaaatgggtttgtaaacttttacgatggaggatttcatttatgctggttcttgtttttttgattgggctttccgcctgcttttatgtgtactataaagtaaaaggcgtacgggcaaagccatctttggcaaaagaaatatgttcagcaaaatcaagcatggccttagggtcactagtcctgttctacgggctcaaccaaatgatattattccattcagtattaacgttaataatcggcggtatctttatcgtcataggagcaggaagcgcttgggcaggttataaagcctttaggcattacaatccccttcacgccaaagaagctgaaagagatcacgcgtaaggggcgcctgaacgtcccttagcttctttccatcagctgaaccatcagcatcgctttagacacgatatgaccttggctgtgcacttccacttccattttcccgaactttctgccagcctccaagatgcgaggtttgacttcgatgactgattccatctgcacaggcttcaaaaagaagatggtgatgctctctatgacgagttcgccgcgttttttcgagcgcaaaaatcggtttgccgcttgcgtcaaaatggtcgtaaatacgccataagaaatggttccaagctgatttgtcatttgcggcgtgacttcatactcgtaaaccgtttgatcttctttatcatcaccctcatctttaaacccccttgaaacgatatcatcaagcttctccccgacctgcggctgcttttgaatcatttgaagagctttcaatacgtcttggcggctgatcatgccgatgagtttttggtggccgtcagtgacgggaagcacttcgatcccttcccataccatcatttgcgcagctgaagcgacagatgttttcccaataaccgtgacgggatttttggtcataactttttctatagatgcatttcggtcatggccagcaatatcttttgatgtcagaatgccatggattttcatttgatcgtcgacaaccgggaagcggccgtgccccgtttcaaaatttttctcataccatttttcaagtttatccttaggcgaaagatataccgtgcggtcagcaggtgttaggatgtcctccaccaaaacaatttcttttttgatcagctggtcatatattgcccggttaatcatcgcggcaactgtaaaggtgtcatagctcgtggataaaatcggcagttcaagctcatctgccagctgcacaatgctgtcatccgtgttaaagcccccggtcaccaatacggccgcgcccgcttcaagcgcctgcctgtgtgcattgattctgtttccgacaatcaaaagattccccgctgcggtgtaacgcatcatcgcgtcaagctccatcgcgccgatgacgaatttattcaatgtcttatggagccctgccctgcctccgagcacttgtccgtctataacatttacaacctctgcataggtaagcttttcaatgttctcttttttcttttgttcaattctgattgtgcccacacgttcaatcgtgctgacaaaccctttattctctgcttccttgatcgctctgtacgcggttccttcgcttactttcatttcctttgcaattcttcggacagaaattttttcaccgacaggcagtgaatcgatatacgttaaaatttgttcatgcttcgttgccaagcctttcacctctaaggacagtcttcttgtttttattataaggtttcaaaggatttatacgcaatgaggctggaaaataaaaaagaagcccgaccggcttcttacagcgttgatttcgtcccagtcaagcgcaaggaccccgtggctccttttacatcgtaaagcggaaaaacctttatttttcttttaaatggacatcaaccgctgtcttaacaatatttcgattccctattttagataaaacaaataaaactgcaaatagccatatcgcccctatggccgtatagatcaatggataaacagctttgtttgcgatccattcatttattaatgttctggcatttaccagaataataaatcctcctacaagcacacccatcaattgcggatgaaacttctgcaccagccatgctgcgataggggcagcgataattccgccggccattagtgaaaacacccataaccaattgacgtcctcccatcctaatgaaataagaaaaccggcggttgcagatacggcgatggcaaattcacttgtgtctacagtcccgacaactttcctcgggctcaagcctttgcgggataataaaatcggagtggtcaccggtccccagccgcctccgcctgtggcatctgcaaaaccagcgatcactcccaatgggatggattgttttcggtttaacggcacatgcttcttctcaagagccggcttatattgaaataaaaacctgatcaatacatatccgcccagaaggagcaaaaacaaagaaatatagggtttcgccacatctccaggtaattggctgaggaatgccgcgcctaaaaaagcgcctatagagccgggaatgacaagctgataaacggtttgtttgtcaacattgccaaatttaatatgcgacactcccgatgcggcagtcgttacgacttccgctaaatggacagaagccgaagccacagcaggtgtgatgccaaacgccaataacaaagaagttgaggtaaccccataagccatacctaacgaaccgtctattaactgcgacaataaaccaataaatgcaaaaacgattaatttcttcatcagaacaccccatctatatcaatcagatatttttgactcttcattcgaatctaacaatctcttggcgctttcatataaaaaataagaggctttgataatggcagtttcatcaattgtaaatgcagggtggtgccaatcatgatcaccgtctgttccaaaaaacgcaaaggatcccggaatatgctcaagataataagcaaaatcttcccccgcggttgatgggtcgggatcaatgacttgaagtttcgctttatgcgcagcgtctcgcaccagccccgtaattgcctcatcattacaaagcggcggcggtccggaatgccacttcacatttgcctttaacgagaatgcggcagaaatctgctctgcgactgccaaaaaacgctgtttcacttgatcacgaacctctgaatcaaatgtacgaacagtgccctcaatgacaactgtatccggaatgacattccaagtgctgccgccgttgattttccctacggttaaaatcgcgctttgcagcgggtttacatttctgcttacaatcgtttgcagggcgacaataagctgagaggcgccgacaattggatcaaaaccattatgcggcaatgctgcatgagcacctttcccttctatctttactttaaatcggtcaacagcagccataagcgggcctgtttttaaccctacagtcccaaccgcgatatccggtttattgtgaagtccaataaccgcatcaatgccatccagttggccgtcctctatcacttttgcagcgcctgcacccgcttcctctgccggctgaaataataaacgaacctttcctttcagactgtcttgattttccttcaataaaaagaccgcaccaagaagcgctgccgtatgaaaatcatgaccgcacgcatgcatgatccctttatgtttagacgcataaggcaatcctgttttttcttcaattggcaaggcgtcaatatcagccctcaaagcaatcgccggaccttctgactcccctgctatgtctgcgaacacacccgtttttagagcagtagggcgaatctgtatccccttttctttaaggcatttttttataaaagcagttgtttcaaattcttcttttgacagttcaggatattggtgcaggtgccggcgaatgccgatgagctgcttttctagcgttgagagatttacgggattatactcccctttcaacttcaggatgtcatttcctgtagtctgatatggataggagccttctatatttctccaataatccaaagacatatgtaccgctcctttccctatcccaatatattttcttcagactcttcaacataagatgaaataaatcggttcaatttatcagcaagaccgcccgccccaaatcttatatacttgctggaaactttcggattatcttctttcaaaaaacttaaaaaagataaaatataaatgcgcctgtaagctacttgtgtaattccgtactcaaaaaaccagttatcaatgacattgtatacgcctcggttgacgccatataggttgttacatttcttgtaaaagcagagatccggaagatttaactcctgatgggaaagcaggctttcttttttgttcggtgccataatcccaatcagttcaaagcgttttgcaacgcaccaaatatcctttttaatttgctttgttaaagactccaaagaatcaaaccttctttcttctctaattttaaagagaatgctgcattcgattttttctccatagatgtctctatgaaagtcaaacaaaaaaatctccaatgtccttttaaggttagagcccaccgtcggtttcacaccgatattcataacccctaaatggaattggtgattgactgtcgccagaactccataaactccattacgcagcccatgcatttttgcatctacatttgccgtggggaatccaagctttctgcctaattgttttcctttcacaaccgtaccggcaatgatcgtcaaaaaagtcagcctcctctctcagcttccgcattcgatcagacgaaacctaatgatgtgatgaatgtaaaacggattgatgctgcggaatgccaagaccgagattttcccgcaatgtcccgccgcgataatcttgacgataaagccctctttcttgaagaatcggaatcaccttttctacaaaagcatcaagtgttcccggtatatccgacccaatgataaacccatccgccgcctcagcgttgaaccaagtttcaattaaggatgcgacacgctctggtgttccgatgaatagagtccgtggaaaagccatttcctgtgctacctcccgcaatgtcagatttctggcttttgcttctctcttaatccggtctgttgtgctttgaaacgcattctttcccacatcgccaatatcgggaaatggctcatccaacgggtaaacactcagatcataatcatcaaaaaaacgagccaaataagtaacagcattttcaatcggtatcaattctgcaaattcacgatacttcttttccgcctcttcttccgtatctgccacaatcgggctgatccctggaaaaatccgcacacttgaaggatcacgcccttcatcagcagctcgccttttcacatccgcataaaacgcttttgtctcttctaatgaattggaatgggtaaaaatcgcatccgcatttttggcggcaaactgccggcctgtttctgatgaacccgcttgaaacactacaggctctccctgtttagagcgcccgatattcaagggcccctctacttgaaaatactttcctttgtgattcaggcgatgaagcttctccggttcaaaaaattgccctgttttcttattgtgtataaatgcgtcatgctcccaggaattccacagcccgcgcacaacatccaaatgctcctgcgcgatttcgtaacgctcagtgtgttcaggcagattggacttactatgattgcgcgccgccccttcctgcggcgaagtaaccagattccagccggccctgcccccgctgatatggtccagcgacattaattgtctggaaatagtgaatggctcagtaaaagatgtagagaacgtccctactaaaccaatatttttggtaaccgatgccagcgcagataaaatggtgatcggttcaaaacggtttaaaaaatgaggaatcgatttttcagaaataaataagccgtctgcaatgaaaataaaactaaacaaacctttttcagctgtttgcgcctttttcatgtaaaattcaatattcgtgctggccgagggatcaacatcgggatgacgccagccgtcagttgttcccccgacaccgtgaatcatggctccaaactgaataaaatctgaacgtgtcatctttttgcctcctttatctgtgcatgattagcaagtgcaagatcaaggtgttcaatgccgatttcagttatcccttgatagtgattgccgcgcccgatttcgaccacaggcacatggcgtaccccatatttcgcctgtaaaatatctcgaagttcctctttctctgaaacatcgatattttggaacgggaaccctttttcattcaaataattcttgacttcctcacaatacgaacagccttttttactccaaaccacaatgttcaaaacatcactcattcttctgaacctccttaacgttttgcagctaaaactgcatcgctcagcagctgataagacagctgtttttcttcagtatttttgatcggtgtaaaaataacaaaatcattgattttgtatgtgcctgataaacgtgttaattcttctgccacttcttcctttgttccggcaataatcccggttttttgcacgatgatgtcatagggctctgtgacgttttccagataggcctcagcctgttcgcgggaaccgacgttgaccttacgcccgtctttcaaatccacttttatcgattcacgcgacacaatatgtttttccgcttcttcttttgtatgtgccgcaaaaacagcgggggcaagatgaaattcagcctcagatcctggcgggagatgcgcgtcaaatgctcggcgggcttccttcagcacttcctcttcaccgttaataaagtaagcaaagacaaaagagattcccagttttgcagccgaaatggcactctctgcgcttcctcccaatagaaaaatacccggcttctgatcaacctgcggcctaggacgcaatgcggcatagcggtgggtatcaggaaaatcatcccgaacgaaatgagtaagctcctccagtttttcatcaaactgacgcaccggttttttatattcggcctgcagcgcgtctgtggacagctgaaacccgccgggcgctttgcccactccaagatctatacggccgggagctaacgctgatagaagatggaattgctccgctactttataagagctgtaatgctgcagcatcactccgcctgatgctaaacgaatttttcttgtgcttgcagcaagatagcctaaaagaacctcgggtgcagaccctgcaatctcatcattgttgtgatgttcggccacccaaaatcggtgatatccacactcttcagccatttgtgccaagttcactgtatgctgtaatgtatcagctgctgtctccccttcaccaatcaagctttggtctaaaatacttaagcggatcatatcaccggctcctttatgtgttcttttggttcaaataaatattccggcgaaacacggcggagaaactgcctcgttctgtcttttttggtatggcgaaagacttcctccggggttccttgttcaacaatgactccttcatccataaaaacaacttgatcagagactcttcttgcaaactccatttcatgtgtaacaacaatcatggtggctccggttttcacgatttccagcattacctcaagcacttcaccgaccagctccggatcaagcgctgccgtgggctcatcgaacagcagcacatcaggatgaatggcaagcgcccttgctatccctaccctctgcttttgtcctcccgataactgactcggataagcgttcaatttatcttgaagcccgacctttctcagttcattttccgctacggcatacgcgtcttgttttctcattttccgggcaatcgtcaagccctccatgacattttcaatcaccgttttgtgagcaaacaggtggtattgctgaaataccattgccgtctgttttctgagccagtgaacctcttttttggacggaaagctgcaattaatcactttgtcatgtatagaaatgatcccttcgtctggacgttctaataaattcaggcaccgtaaaaaggtggttttccctgatccgctcggcccgataatcgtcacaacttctcccttgcgtaccgtgagatttatcccttttaatacatggtggatgccaaactgtttatggatatttttaatctcaatcataaagtgcctccttgaaatctggctgcctttctctctaatactccatttgcggattctaggattagagtcagcacccaatagataatcgctgctccgataaacgcttctaaaaatgcataattatcagaagcaacgatagtcgccgtccctgtaatctctgggacagccactatagccgcgatagaggtggtatgcaaaaagccgatacccaaatttgtgaagtttgggatggaaaccatcagcgcctgcggcaatattacacgccgaaaggtttggctgtgtgtcaagccgattgaataagccgcttcgacctgtccggtatccatcgccagaatgcctgaccggatgatttctgtgagataagctccggcagttaaagacaaggccatgatgacaaacatggagaccggtatctcattggcggaccagccgagatgaaaaaaactgctgacttgatctgcaacaggaggtatccctaaataaatcaacataatgtgaaggattgcaggtgtacttcgaaagaaagacacataaaaccttgagcaagccaccaagcccttaattctaaaaattctaacaattatatttccaagagccacgagaaatccaaacacaatcggcaaaacagccatcatcaatgtcagaggaatggtctttaccatttctttcatggcggaaacgataaatggaaagtcaaattgcaatcttctcccccctcatccgaagaaatatatcaatgtatgttcatgtcaaaaacagtaacaatccttgtttgattcttcttgattcgtttttctgccactcgaaagaaccattcgaataaaactgcaacagcataataaacaatcgatagcgcaatgtaaacttcaagagaatggttgcttgaggtaatcagtgtttggccccttccggacatatccataacacctattgaaaaagctagagatgtatcttttaaagaactgatcaccatgtttcccatattcggaaatgcctggacaagtgcctggggcagaacgattcgcctgaaggcctgactaccgcttaagccaatactgtacgccgcttccgtttggcctttatctacactgcccacccccgctcgaatgatttctgcggctgccgctgcattgcttaacgcgtaggttgcgacagcagcataaaacgggtccatttttgatgtatcaatcccgataagtcccgtaagcgccgggattccgtaaaacacgatgaaaagctgcaccatgataggcgttcccctgaaaaatgagatatacacttttgccaattgatttacaattggaatattgtagatgcggggcagtgccagaaagagtcctaatacaaaaccgaaaagcaaggacagtgttaaaatgtataatgtaaccggtaaataagcggttaacgtcggcacaaaatctccaatcatgttcatatcaaacgctttttccatcactgctccctctcttttcacctaatactgctctttggaatagtcgtcaccaagccattttaaactgagttttttcagcgttccgtcatcaatgatttcctgtaaggctttatcaatatcgtcacttaacgtttgttcatttttgttaaacataaaatacactttggcatttgaaagcacatgaccgacggttttttctttaatagcgctcgtcttgttttgaaagtctactgcaaaaggcgttgagatcgttgcgtccgcacgccccgatttcagctgattcgcagtctcatttgcgccttggccctcataggcaatctcaaacggccgtccattatcctcattccattttttcagtacaagcgctccgttggaggttgcactcgtaatcacccgttttccttttaagtcttcaattccacggatcgtatcgttattttgaagcacagtaatttttaaaggaaaatggttgtaagcaaccttgttaaacagaaattttttctcacgctctttgcttttctccatttgatgtgccacgatatcgactttatgctgtccgaggctgacaagcaggttggaaaattccatcgttttaaatgtgaatttataatgtggcaggcgcttatcaagctctttgatcagttcgacatcataaccggttaaatcgcctttttcatcaataaagcaaatattcggaaattgggttccagttccgaccgtgatcgtctgtaccttcttttgcccggctcccgtcgtttgactgcctgcaccgcaagctgacagaactgttataagcgaaaataatattgccatgaatgctgttttcgttttcatctcatcgccccatttatttttcaaaacttgattttgaataatctgccccgagccattttcggcttagtttttttagcgttccgtttttctccagctttttaatcgcttgatccgtgtcatccgccaaggtttggctgcctttattaaacataaagtacacctcggtatctaataacacgtcaccgactgtcttttggcggaaggcgtgcgttttattctgaaaatcgacggcaatcggtgtagctatcgttgcatctgcgcgcccggtttcaatttgattggcggtatcattgcttccctgtcccgcatatttcaaatgaattgggctgccgtgcgttttgttgtactttgtaatataatctgccgcatttgacgtggcgccaactatgactgtttttccgtgtaagtcttttaatgtatgaatcttgtgattatcctctttcaccgtgatgtacatcggcgagtagttatatgggactttatgatacaaaaaacgcttttctcgttctttatttttggccatattgtgcgcaatcacatcaatttttttatttccgagactcgtcagcaaatttgagaaatccatcgttttaaattcaaatgtatattgaggcaactccttatcgatggctttcatcacttcaatgtcatacccggtcaattcacctttttcatttaaaaacgcaatattcggaaaatctgttccagtgccgactatgaccgtttgagcctgacgatctgttttgttatttgtttgcgaacatcccccgccaagtaatgcaaacactgacagcagcaaaaccaatcctttacgcttattcataggctgcctcacatcatgcccagctgggcgcacctaaaagcgttgggttaaatcgttccggaatcagaaccttgtgcatcatcacacctatgtccccgtctttttcctgctcaaaatacacttcataccctctccttctgtacatgtcagcaagccaaggatgcttgcgcgccgatgtgccgagtgtcagcgcaggagccttcagcatatctcgaagcactttttcttcaacatacgtaagcagcttacttccggcgccttgccctttatattccggcagtgtcgcaaaccaccacacaaatggatattttgaaggaggcgtctcactctcccacgggaacctgattgtaatcgttgaaatcagcttcccatcccgctccagcacaatcgctgaatgatgttcaatattttctgataccatttggatatcagctctcgtggatggccaatcaatatccagctgccgaatgggctgaaatgcgctgttaaccagtttcaacagctccgatgcatcttcaacagttgccagtcgaaaaatatcatcactcatttttgtcactcctcttcacaatatatataattcctatttgtttactaatcttttattgtttatactataaagcatactctgatctttgactaatcaaaaaaagtaaaccttcacttcagtaattttaatgatgaaaaacaggagggagaacattggagttacgctcaatcaaaacgtttcatacgattgtaaaatttggaagcttctataaagctgcagaaatactcaactactcgcagccgacgatatcgatgcgtatgaagcaattggagcaggatttaggcgtactgctgtttgaaagaggaaaaagcctgcagctgacaaaagcagggaaacttttttatgaacgaacaggagatcttttgatgcaatacgaggcgcttaaacacaacctctccgacttaaaggaagaagaggcaggcattatcaacataggggtttcagagccaaccgccagtctgatattccccgagattttaaaggatttcttaaaggattacccaaagataacagttaatatcaaggttgatgacgccaatacctgcagtcaaaagctcttagacgggacgattgattttgcagtctgcggcgagccggagctgattcttgaaaattactaccatccatttttttatgacacattaaatgtgattgtatctgagcaacatccgctcgctgagaagaaggctgtccatttgtctgatttagcagaagagcgcttcatatttacgcccgccaattgccccattcgcttacaaattgaacagcatttacatagagaactcgggaatcgttacaaaaaaatggagctcacaagcagcatgtcacatgaatattacgtacgtgaaaacatcggaatttcaatctttaccagcaccgcacattctaaaccgttcaacggcactaaagtcattccaattctgaacctggatatcaccccgcccatagggctgttgacaaatcaaaaagaagttcattttgaccgcgccacgaaggacttgatcgcccggataaccaaacgttttcagcagcgcagcaaagaattggaaggaacctctgataagaccattacaggataactgaaaaaataaaaaccacctcctgattcatcaggagatggtttcacggtttaaagctcgatcgtctcaccgaccgacatgactttgccgactccgcccggcaggctgtcagcgaatgcttctgggtcttgttcgatgaccgggaatgtattgtaatgcaccggcacgacctgttttgcgcgcagccattcagcagcaagcttggcgtcttcaggccccattgtaaagttatcgccaatcggaaggaaagcaaggtcgatatgattcaattcgccaatgagtttcatatcagagaaaagtgccgtatcgcccgcgtggaaaatcgttttatcttctacagtcagcaaaataccggcaggcatgcctgtgtaagtgatcgttttgttttcttcatctgtgatggctgatccatgaaaggcctgtgtgagcttcacttttccaaaatcgaactggcgggagccgccaatatgcattggatgaacattcaagcctttccagcctaagtacacagcgagctcgttcggggctataaccaacgcgttattttgcttggcgatttgttcagtatcaccgacatggtcattgtggccgtgcgttaataagatgacatccgcttttacatcctccggctttatatccgttaatgaattccctgttaaaaacggatcaaaaataatatgatggtccttcgtttccactgtgattacagaatgtccgtgatatgtcactttcatttctttcacctcgtcacatgattttgatttttttattttccctttttaaaaagctgaaaaacttatgttgtttgattcttgttaatgacattgaggccaccggtggcttcaatgacagtccctgtcacaaggtctgagttctcctcacacaagaaagcgataatccgggcgatatcctcgcctgtaccggatcttcctatcggcgttttttctttgccgattcgcattctggcttcctctatcgatgcttctttcatgtcgccgacaatgtctcccgggcaaaccatgttggcggttatgccgaattcggcttcttcaatggcaattgtcttcgtcaaagaagccaagcccactttcgcagcgccaaatgccgatcggtgaagccagccgggcgcgtgagccgcaccttggaatccgtacgtaatgatgcgtccaaattgctgttttctcataataggaataaccgctttgaataaatgaaagacggcgcttaaatttccttccagcatgccataccattcatcatcagtataatcggctaactttttacgttcaaatatgtatggtcccgcgttgttaatcaaaaagtcgatccttccgaagcggtttaaggcagcctctgcaatacgcagcagatcttcttttttggtgacatcaccttttacaaattgcagccggtcaagacaatcgggacaggcttccttcaggcggctgactgcctcctcatcctgtctgtaattgactgttactgaatacccctttgcaagcaacgtttcagtcactttgcggcctaaacccttcgaaccggcagtaattaaagcatgtcgcacatgaatacctcccaaagcaacgtcgccgctttcaataaagtgtttcttcttctactttactataaaaggcttgcaatatcactttttacactttggcatacaaaaaaagctgcctgtacagacagcttattctgcaggagatgaagactcctgatcaggcatatcgacataaccgctttgatatgcttctgaaatgagccttgttgtctcctggctttcttgttcatcataaatatagcgttccggttcttttttcatcattctgcctcccatcattatagaggtaggttggctataatgacgggattttatgaaggaaattttaacaaactcctgctgctacgcaagctttcgctttttcaagcgcctgctttacctgtttgaatccggtgcccccggcgctcattcttttttcaactgcgtagtaagggtctaacacagtgtaaatatcttcttcgaatagtgtgctcgcctgctgaaactcgccaaacggcatatcgcttaaatagatccctctttcgatgcatgtgtacacaagtttcccgaccacttcatgcgcttctctgaacggcattccctttttagctaaataatccgccagttccgtcgcatttgaaaagtcttgttttgttgcttgcttcatgacgtctttgtttacagtcattgtttggatcatgcctgtgaagatttgcaggctgccctccaccgttttcaccgtgtcaaacatgccctctttgtcttcctgcagatctttgttgtaagcgagcggaagtcctttcatgatcgtaaacagccccatcatatcaccgtatacgcgtcctgttttgccgcggatcagctccgccatatcagggtttttcttttgcggcatcatgctgcttcctgttgcgtacgtatcgtcaagctcgatgaatttaaactcctgcgagcaccataaaatgatttcttcagagaaacgggataggtgcatcatcagcatactgctgttgcttaaaaactccaaaatgaagtctctgtcgctgacgccgtccaagctgttttcataaatggcatcaaagccgagcagttccgctgaataatcacggtcaattgggaaggttgttcccgcgagcgccccgcagccgagcggagatttgttaatccgcttcattgaatcctgaaaacgctccttgtcgcgctcaagcatccagaaatacgcaagcatatggtgagcgaatgaaatcggctgggcgcgctgcagatgtgtgtagcccggcagaatcgtttcaacgttcgcttccgccttttcaatcagcgcactttggaatgcctcaatcagctcgatgatgtggccgacatgattcttcaagtataaatgcatgtcagtcgccacctggtcattccggcttctgccggtatgcagcttgccgccaagaggaccgatttcgtcaatgagcattttctcaatgttcaaatgaatatcctcataatcgactgagaattccaatgctccctcctctgctttttgcaaaagggtattcaggccctctcggattttcaactcttcttctgctgtcagaataccgcattttttcagcatggcagcatgtgcgagagaccctgtaatgtcttcagcaactaaattttggtcaaatgatatggacgcgccgaactcgtcgacccatttttccggtgttttttgaaatcggcctccccagagcttcttcatgctttaatctgctccttcttttttacgatgctgttcacttttgtcggaagtccccaaagctcgataaatccaattgctgcatggtgatcaaatgcatcgtcttttgtatatgttgcaagtttttcatcatatagagagtattctgatttacgtccttctacaattgcatggcctttaaacagcttcacgcggacaatgcctgtgacatgcttttgcgtttcttttaagaaagcgtgcagcgcatcttttaacggcgagaaccataagccgttgtaaatgatctctgacattttttgctcgatgatcggtttaaagtgggctacctctttcaccagtgtcaaatcttctaattctttatgcgctttgatcagtgtcatcgcaccagggcattcgtatacttcccgggatttaatgccgacgaggcggttttccacgtggtcgatacgtccgacaccgtgcgcgcccgccatttcattcagcttcaagatcagctcagaaagcgagtaggaaacaccgtcaatggagacaggcacgccctgttcaaatgcaatttcaatcacttccggcgtgtccggcgttttttccagcggagctgttaaatcgtatgcaccttctggcggcgccgcccatggatcttctaaaatgccgcactcattggcgcgtccccagaggttttgatcgatagaatacgggctgtcaagattgatcggaatcggaatgccgcggctagccgcatattcaatttcttcttcacgtgaccactgccattcgcgaaccggcgcgatgacttctaggtcagggtttaatgatttaatggagacttcgaaacgaacctggtcatttcctttcccagtgcatccatgggcaatcgcctgtgcatcttctttttccgctatttcaaccagctttttcgcgatcagcggccgagataatgccgaaacgagcgggtattttccttcatacatcgtgtgggcctgcaaagaaataagcgcgtaatcctgtgcaaattcttcttttgcatcgatcacgtaggagtttgtcgcgccgacttcaagcgctttctgctgaacaaatgccaaatctttgccctcaccgacatccaggcagcaggcgatgacattatatccttgctcctgaagccattttattgcgacggaagtatcaagaccccctgagtatgctaatacgacttttttctgttctgacatgataaaaatcccctctcaaccgtgtttctattttgtataaaaataaattatatttaataaaaatacattttgtatgtatacactttaacaagtacgtttcgttttttcaagccttttacaaaaaaaacttcacctaaatttcaggtgaagtttcgtagtatttattcatttacttgtcttttctgatttctctgaccacatgtgcaagttcgggaataatcagcttattcattgccagctttaccgcgccgcttgagcctggcgttgagaaaacagcggtatgctgaatgacgccggcagttgctctcgacatgattgcggcagggccgatatcctctgtataactcagcatcctgaatatttctccaaagccgggcagttctttcgaaaacagcggcgttatggcttcaattgtgacatcccgatctgctatgcctgtccctccgtttaagagtaccgcgtctgtctgttcatccatgcagcccgcaagcactgaccgctgcaaagcatccttttcgtcttttacaatttcatatgcggcaatatgatgaccggcttcttctaaaaatgagatcatcagcttgccgcttttatcggtttcatctgtcctcgtgtcactgacagtaatcactttgcaccgaacgatatcgggagcttcttgtttatgctcttgaacgctcattggcccacctcttttatgttttctgtctgtcactatcatgcatcaacaaaaaagcacattcaagagaatgtgctttcatgcgatttattttgctaaacgaacaacgtcgcgcgcaatcatgacttcttcatcagtcggaatgatcatgacttttactggagaatgcggatagctgatgaaagcttcctcgccgcgcacgttattaagcgcaggatcccagtatacgcccatgaattctaaaccgcgaagaacgcgttctctgacttccacactgttttcaccgataccggcagtaaagatgatcgcatcgacaccgctcattcttgcagcgtaagaaccgatgtatttgtggattctgcttgcgaatacttcaagagccgtttccgcgcgctcatttccttctttcgttgcttcaacgatgtcacgaagatcgcttgagaaaccggaaatgccgagcagtccgctttttttgtttaatgtattcagtacttcgtcagccgtttggcctgttttctccatgatgtatgggatcagggcagggtcgatgtttccagagcgtgtgcccattgctacaccggcaagcggcgtaaagcccatggatgtgtcaatagattttccgccttcaacagcggcaatacttgctccgtttccaaggtggcaggaaatcaggcgcaagtcttttaacggacggccgagaagctctgccgcacgctcagttacatatttatgtgaagtgccgtggaagccgtatttacggatgccgaatttttcatagtattcatacggcaggctgtaaaggtaagactgctcaggcattgtttggtggaatgccgtatcaaatacagctaccgcaggaacatttggaagcacttctttgaacgctttaattccaacgatatttgccggattgtgaagcggtgccaattcagaaatatcttcgatttccttaatggtttcatccgttaataaaacagaatcgctgaatttttctccgccgtgaacgacacgatggccaattccgtcaatttcattcaagtctttaataatgccgaattccgttaacttattcagcagcattttaacagctaccgcatgatccggaatatcagttacttctgtatttttttcgccgttcacagaagttgtgaatacgctgtcggcgataccgattcgttcaactaaacccttcgttaaaacggtttctgaaggcatttcgaaaagctgaaatttcaaagacgagcttcctgcgttaattgcaataattttggacatgattgacgctcctttatactctgtatcaacaacttcgtttttcgtacttttttcccggtgaatatcaacatcttctccgaaaaatatctgacttttccatttaaacattgtcatgtcggcttttcaagtcaacttgcgtattgataacgcttacaataagaagtcgttattttcagacacattccctataggttttgtattgatgaacgcttacaatttgcggtttttccctctgtattttgtgtttcaaagctggattcaattcgtcaagtccggtcttcaaaagcataaataaaagcagcttaggcatcgacctcatacggctgtctaagctgcttttaaaacacttacttttcttttttaaaccattcatcaaattgagccatcatatcaagcatcgccttttgattggagaaagacggaagattcgcaagcagaatttgccccggcgctttcgtattctctccttgtttctgaagcacaaggatgcttttggcatgagcttcgtctttaaaaatagattttggcagctgcaacagtgcgttgatatgaaccttatctttgaaaaactgtttcagcttgccgctttgggagctctcaaacaaatgattcggaatcataaaaaataagtagccgcccggtttggtatgcttgacgctctgttcaataaacagatgatgagcgaaggaatggccttcgtcagctttaagctcaaacgcttctgctccttcgtcattcggataatagccgactggcagatcacaaatgaccgtgtcaactggatcgataaacaacggctcaaggctgtcctggtggaaaagctcaagctcttttttcagaaggttcgcttgggcataggcgatcttcaagagcacatcatcaatttcaatgccaaagctgtttgccgttttttcagacagctggttcagcacggtaaacagaaggttcccagttcccaaggctggatcaagaatggtcaattcctttttgtccgccataaacttattcaccaaatagctgatgaaaagcccgatcgtatccggcgtcatttgcctgtttggatgggagatatctttcattcctttaaggacggcaagctgaaaagccttgcgtacccactcatgctcatacgtgccgaattccgctttttcaagcagagcctgaagttgtttggttttctgatcagcaggcagtttcagctgatccgttttttcaagaaaatacatttctcctgcttcggcaagcgcctctatatatgaaatctgcaattcattctttatcataatcgctgcttcgtttaacagctcatacaccgcacctacatggtctttttgcatattgtgttcctccttgccatgaaaaaagctccggcggcagcctggagcttttttccctgcttacttcactaatgccttagcagcctcaattggcttttcatagttcgggtggtttgttgcttcgcttacatattcagcgtaaacgacttttccattctcatcaaggacaaatacggaacgcgcaagcagacgaagttctttaatatacacaccgaacgctttgccaaatgacatatctctgtggtcagacagtgtttccactttgtcaattccgttagcgccgcaccagcgcgcttgcgcgaatggaaggtctgcactgattgtgtagacgttgacatctccaagctttgcagcttcttcgttaaaacgtcgtgtttgtgcatcacaaacacctgtatcaattgaagggataacagaaataatcgttacctttcctttcatgtcagctaacgatttttcttcaaggctgttagtcagcactgtgaaatcaggagcttgatctcctaccttcacttcttgtccgacaagtgtaaccggaccgcctttgaatgtaatttcagccattataattcctcccttttgtatgtatgtctctatcatagtaaagtttcctgcaaactgcaaagtttatgccaaaaaaaagttaactgcggccagcgcagttaacctttttttaataattcatattgttcatttggttttgattttggccctgactttggttcttgttatttttcttgaacatttgctggatgcgttcgagtgtttgaggggctgcgtctaaaattttctctattaaatgggtattttcatctaaatgaagcattctgatgcctgtcgatccgacaattaaaaacgcgatcggcgtaatggacacaccgcccccgcttccgcctccgaaaggaagtttctgttctcttgtctcatcgtcttccgatttcttttcggccggctttccgccaaactcgcttccgcctgcggcgaatccaaatccaactttagaaacagttaaaatcacacttccatcaggcgtttctactggatctccgatgatggtgttaacatcaatcatttccttcaagttttccattgcggttttcattaatccttggatgggatggtctgccatatacgcttcctccttaaactgatgaatcattctttgaagtcattctagccgacggattcttctttaatacggatagctcccgtccgtatttgacgaatttgaaagctgcaagcatagcatgtccaaagcgaaaaaagaatatacactgaaaatgggtcttggaagcaggggcttgaaacgacgggatcacctcatagacaggtttattcacaaagtccaggtggtcgtagagcattgctgcgataccgcccttcacgccccatacagcacctgttaacacacctgtcactgccgcgtcctgaattccgattactgtaacccattctagttttgtgatatgtaaatgcgcgagaaaagacgcgctgattttccgtagtctggtgacctgatgcaaaagcatttcgattttattaatgctttgctgcacatcgttttgtgtaatttttttctttccgctgctttttttcattttagattcagttttttgtttgatatccactgttccgtcttctttgttcaccttaatcgccgggattgtttttttgatccttataaggccaaacagcgccgtaatcttcaaggtcaatttgtcattatcagcggcatgaagatactccagcgcgacatggattttcattctgagaagcagtacgatccctatgagaataagaatggctgtcagtacatacaccatattcttcacttcctctaggagcattatcgccaattcctaaaaaaataaacccggacggaggtccgggttatcggttatttgcggtataatttttcatgcaccacggtggtatccgcgatgtaatcatgaatcccttgttttgtaggtgaaaaagcaacaacgatatataaaatccaaatcttatcaatataccgtccaaccacttcacgaaaaatcactgtactccatgtcagcttgctatcttgcttcacagaaaccactttgaggccgaacaccattttaccaagcgtctgcctgaagtatttagtcattagtgcgaagtaggcaagatacacaataagcgttgtcacactgtaggccgagaaggtaaacatgccggatgttttcggcagatccaatacggtaaagaggggagaaacgagcaaatggtttaatccccatatcacgagccaatcaagcaggaaagcccagaaacgaacccaaaagccagcataggcatgtgtcagctgctccgcttcttgcgggcctttgatgtcattgcgctctaactcttcatatgtcgcgtccattattgttccctcctacttcgcatagagatacatcattctcggcgaaccggattgcgatagaatttctctcatattcaaaaaatcaatttcacttttaaacattttgttcgcgcccatggaaaacagtgagcctaatccgaagctttcctcataagaaatgacagaggcgtttttcaaatccttgtgatcctttttcatggccgtaatggtatcgtcataaaaaccaagctcatcaacgaggttcagttttttcgcctgccgtccgtcatacacgcggccgtccgcaattttctttacctctgctttcgacatgccgcgcccttttgaaatgacatcaacaaagccttcatacgaattatcaaccatcgattgcatgatgtttttttcttctttcgtcatctcacgggaaggagacataatgtccttatgggccccgctcttaatcgtttcataagaaatgccaagcttatcggcaagctttgaataattgacgctttccataatgacgccgagtgacccggtcagggtttccggtgtcgcaaaaaccttatcagccgctgttgagatgtaatagcctcctgatgctgccatcgaacccattgacacgtaaatcggttttttcgtttctttcttgatttcttccagtttcttatgtatttcagcactttcatacactccgccacccggagaattcaccttcagaacgatacctttgaccgtcttgtcatcttttgcgcgctcaaggttttttaagaacgttctgtggttatatccgtctgcaccaagcagactgcttgagtccccattatcctgaatggtgccgctgacctctaatacggcaattttacttgagagactgccgttttccagcgtcttttcctgcgattcatccgtcagtgatgtgagatccgtttgagcgcctttgacgctttcaaagaaactcatagagatgctgacgataatagacacgccgaaaatccccagagcaatcactaatgcaatccatctttttgcattcattttttctcctcctttttcctaaactctctcattatacgattcaatatgaaaaatgtttcacttcatgagaaagctccggcttaacgggctgccggcaaacgtggtacacttatggccaaaggtattttatcacaaatactggatggcagaaaaacttaaatatgacagcaaaggggaaatgggatatgaccgatcaacgccgtaatgtttatttttttcacaaacaggatcaggaaacgaacgaacaagcccgctcgttaacacaattagcggaagagcatggatttaccgttgtgaaccagcactcagacgccaatattatcgctagcattggcggggacggcacatttttgcaggcagtcagaaagacgaattttcgtgacgactgcttgtacgtcggcattaccaaaaaggggaaagctcatttatattgcgactttcatagtgatgagcgagaaaaaatggtcgatgcaatgacgtttgaacaaattgaagtgagaaaatacccgctgattgaagtgacagtggatcaagccagtccttttcactgcttaaacgaggtatccatccgctcaagcatcatcaaaacctttgtgatggacgtgctgattgacgatctgcactttgaaacgtttagaggtgacggaatgattatctcaacgcctacagggagcaccgcctataacaagtctgttgcaggagctgttgttgatccattgcttccatgcatgcaggtatcagagcttgcatcccttaacaataatacctaccggacactcggctcgccatttgtcctcagctctgaccgaaagctgacccttcgtgtggtgcaggacggcaacgaacacccaatcatcggcttggacaatgaagcactcagcacgagaaatgtgaaaacgatcgaaatcaaactgtctaataagaaaatcaaaacagtcaaactaaaggacaattcattttgggaaaaagtgaagcgtacttttttatagaaaataaaaggacaggctgctgcctgtccttttatgatttctcatatacaatctggccgttaatcacggtttttttaatatctaaaagatgaagctgtgcggggtcaatggcaaacggatcaccactgagaactgtaaaatccgcatcatagccttccgcaatttttccgcgtgacttctctttataaatgataccggcgctaccttctgtataaagctttatcgcttcatatacaggtaaacattcactttcattatagcttggcccgttttgctcatgactgcttttcctgaggaccgcggactggatccctagaagcgggtcaacaggctcaatcggggcgtctgaaccgcccgcgcataaaatgcctttagatatgagggttttccaggcaaatgcagtcttcatccggtcttttccgagacggtcaatgacccacggaaagtcgcttgcaacgaaatgcggctgaagatcaagtgcgatcggcatgcgtgctgctctctcgattaattcgttatcaagcacttgggcatgaataagccgatcatgccggccgtttttgggcggatgcttttcaattgcgttcagcactttttcaaaagcaagatctccgattgcatgaactgcaacctccatccctttttctctcgctttgcgaatgagccggccaagggtttcatcatcgtgaacctgaacaccatttgttgatggatcatcctgatatggttctttcaataaagccgttctcccgccaagcgccccgtccgcaaagattttcatcgcaccgaactccacatacgggccggacagcttctccagctgctcccatcgatcgaccgcttcatgatgaacgagcaaatggcagcgaaacggatactttccgccagcggcagctttctcataagctttcaacggcaccgaaacatcaccataataggacaagtcttccgaatgaccgcccgtcaggccttttgtccagcaatcctttattgcagccgttaatgcctcatcaacatagtgctgagagactggcgggacagccttcagaatcaaatcctgcgccttatcaaacaggagtccggacggctctccatttgcatcttttacgatgactccgccgtcagggtcaggagtatttcttgaaattcccgctgcttgaagagccgcagaattgacagctattgcatgccggcatatacgcttgagcaagacgggtctgtctggaaacaggcgatcaagatcatgcttagtcaagtagtcaggtgtcccaaactgattttcattccagccctctccaatgagccaatcgtttttaggaagctgccgctctctttccttcgcagcctgtaaaattgaatctttcgacgtcagtgcggacagatcgagctgaagctgtttctcaccgtggccgatcaaatgtaggtggctgtcaacaaaaccggggaacatcactgcaccgttcaggctgatttcttctgtttccggtgacccgtacttttccttcaaacgttcatagctgccggtgccttttatgacaccatcctcaacataaactgcctcagtccgatcgccttcttcgagcatcgtataaatgaaaccgccgtgccatatcgccttcattcacgttcactctctttctttacgcctttttattggctttgagctgttcttcacgttttcttaattccactcgtctgatttttgcagaagccgttttcggcaggctttccacaaattcaatttctctaggatatttgtatggagcggtaatcgtcttcacatggttttgcagcattttgacaagctcatcactgcgtttttcatgattttgcaggacaacatatgcctttacgatggagcctctgatttcatcagggcttgcgacaacagcacattcttttacttctgggtgcttaacaagcgcgtcttccacctcgaaaggcccgatcgtatagccggagctgataataatatcgtcatttcggctttcaaaccagaagtaaccttcctcatcttttcttgctctgtctcccgttaggaaataatcgccgcgaatttgtgttttcattctttccggatctttaaaatactctttaaagagcgcaggcgtactgaggtgaacagcgatatcgccaacctcaccaggtttgcagatttcaccgtcttcatttatgatctccacctgatttcccggtgtcggttttcccatgcttcccggtttaataggcgtatctttcaaaacaccaaccaaaagcgtgctttctgtttggccatatccgtcccgtaccttaatgccaaagtgcttttggaaaacatcaatgacttcacggttgagcggctcacctgcggaaacagcgctgtgcagggcagaaagatcaaagcgttccaagccttcaaccttcgccattaagcggtattctgtcggagtgcagcagaaaacattgattttgtagcgatttaaaagctctagatatttttctgctttgaatctgccgtggtacacaaaaccggttgctccgctgccaagcaccgctaaaaacggactccatacccacttttgccagccaggggcagcagttgcccagacgatatccttttcagaaatgtcaagccaagcgccggcagaagtttttaaatgagcaaatgcccatccatgtgtatgtacaacacctttcggctgacctgttgtcccggatgtataagataagaaagccatatcatctcttgttgtgtcagctgttttaaattggcttccgtccgcttcaattgataagaggtttttccagccggcatcattttcaccaatagacagtgtaatcagtttgtcagtcgtactgacatcccggaaagcgccaataaattcggagtagacgatagcgccttttacctctgcatgttcaatccggtattcaagatctttcgcgcgaagcatttcggagcacggaatgacaaccattcctgatttcaggatagccaaataaacagcataggcttcaagcacccgcggaaccattacaatcagcttgtctccctttttaaatccaagatcagctaaggccgctccgattttatttgtttcttccatcagcttttcatacgaccaagattcttgcttgcccgactcgtcctcccaaagaagagcggttttttgtccagcggcactgaacttttccatttcattcactaaattatattgcataggggcaattaaatcttcacgttttaacacgaacaactcctcactttctccacccattatacataaatacaggctctttccgtaaggatatgcctaaaagcaacctctgtaaacatagattttataggccgctggtccttttttatattataaaaaatgaaaaggagtggggatacccccactcctaagccattatgtgaaattgtaaattagaattgtcctccgcccatgttttgttgagcaaaagatacaagacgttttgtgatctctcctccaacagaaccgttagcgcgagaagttgtgtctgctccaaggtttacaccgaattcagaagcgatttctaatttcatttggtcgatcgcttgagcagctcctggtactaaaaggttgttgctgttacctgagttattgttagccatgtgtctcacctccttgtgagtatagaatgtgtcaaaacacatggcttcattcagaaaaactttggtaattgtatacaggagctgaaaattgatttaaaagagttcagcgaatttatcgttagcttcttgttcgctataaagggtcattgtctcaatgttatctaccgcttcttgaatatacggctcgaaatcaacaaagctttcaaagtgttcaattttctcttttttagggcgtgttttcgggcttggcggtgtaaagatcgtgcagcagtcttcaaatggctgaatgcttgtctcatatgtgccaatttcccgtgatttttcgatgatttctgttttgtccatggcgattagcggacgcaaaatcggtgttgacgtcaccgcattaattgcatacatgctttcaagcgtttggctcgctacctgaccgaggctttctcccgtaataatggcaagcccgtttctcttttctctgattctgtcggctatctgaagcatgaggcggcgggttgccgtcattgtgtaattttcaggaatttgtttttggatgagctcttgcgtttttgtaaatggaacaatatgaagtgtcatgcttcccccaaaacgggacagacatttcgccagatccattaccttttgctttgcgcgctcgcttgtgtatggcgggctgaagaaatgaacagcttctaccgacaatccccgtttcatcgcataaaaaccggccacagggctgtcaaaaccgccagaaagcatcagcatcgcttttcctgctgaaccaactggcagcccgcctgcacctttttcatcacgaattgtcaaaaatgttgcttcttccctgatttcgattctgagcgggatgtctgggttgcgaacatcgaccgtcaatccttctgtatttcgcaaaatatggccgccgatttcagcgttcatctggtttgtatctaattcaaattgcttatacgctctctttgtcgcgactttaaacgtatcacctggtttatactgatctttgatagcctttagtgcggttgccttaatatcatcaaggcggctgtcacatttaattgccaggctgaagctttgaatcccaaacacttgctttaaatgaggaaaaagagcctcaggatcctctccatttaatgtaatcgtcatacgatccctgttggaaaagtattttaaattcggatagtctttcaaaacgagtctgatgttttgttttaagcgctcaataaagctttttctgtttttgcctttggtcgaaatttccccaaaacgaattaatatatgatcgtaattcatgttctacctcatcattttccttaattttttgataccaggacgaagcgcgttcataaacggttctgccacatcgcttgtctggctgtaatttaaactgattctgatgctgcttccggcaatctgctctcctttgcccatctctaagagaaccttgctgggcttatgttcttttgccgagcaagccgatgttgtggagacgaaaatatcctgttcctcaagcatgtgtaaaagcacttccgctttaatccccggtacagagaaattaataatgtgcggcgcgctattcatttgaggcgtgttgataacgacgccctcaatttcactcagccttttcataaacaattcctttgcggcagtcatcgtgtcaagccgtgtgtcaaaatcagcagaggcaagattaatggccttggcaagcgaaaccgctccagcagtatgttctgttccggcccgtatgcctttttgctgagagcctcccgttatgagcggaataaggcgtgttccctcttttacaataagtgcgcctgtcccctttaggccgtgaaatttatgccccgaaattgaacatagatcaatgccggccttttcaattgccaagggcactttatagatgccctgcacataatcgacgtggaacaaaatgttcgggtgcttcttcagcacttcccctgccgcttcaatcggctgcacggaaccgacttcattgttcacatgcatcatgctgacaagcacggtatcgggacggatggctgcttttagatcttcaatagaaacaaatccgtcttcattcacagaaagataagtgatatcaaacccgaacaactctttcagctgttctaacgattccgtaacagatggatgttcaatagaagtggcaatgatatgtttgcctgtttttatctttgacaaagccgctccttttaaagccgcattattggcttctgtggcgcctgacgtaaatacaatatcatatttttttaggcctaaggaccttttgatttgatttttggctgcttgaagcagctgttccgtttcggctccatatcggtgcaaagatgaaggattgccaaagtatcggctgcttgtctgttcatatacgttcaagacttcatcgtaaggcttcgtcgttgaactattatctaaatatatcatcttttttactcctttatgaaagcggtacaaggtatgatatttatgttaccataacaaaatttaatagaaaattacgaaaaactagtattgacttctaatttttttaccatataataagatttgttcgtttcgtcatattatctgacaattaattgacagaatattttaacataattattaggaggatttttttcatgaaacactcactgcctgtcaaagataccattattattggtttcatgctatttgcgttattctttggagcaggaaatatgatttatccgccggaacttggacaagcagccggacacaacgtctggaaggccatcggcggatttttactgacaggggtaggcctgccgcttctcggcattatcgccatcgcattaaccggtaaggacgctaaaggccttgctgacaaagcgcaccctgttttcggcacaatctttactgtcgtgctttatttatcaatcggaccattattcgccatcccgagaacaggaactgtttcatatgaaattggcgctgttccgtttttgactggcgtaccagaaagactttctttattaatatttacacttatctttttcggcgttacgtactatttagcgttaaacccatccaaggttgtcgatcgagtcggaaaaattctgactcccatcaaattcacgattattttaatcattgttctcaaagccatcttcacgccgatgggcggattgggcgccgtgacagaagcatataaaggaacaccggtttttaaaggatttttagaaggctataaaacaatggacgcacttgcttcaattgtatttggcgttgtcgttgtaaatgctgtaaaaagcaaaggcgttacacagtctaaagctcttgctgcagcctgcattaaagcaggtgtgattgccgctttaggcctgactttcatttatgtatcccttgcttatttaggtgcaacaagcacaaatgccatcggtcctgttggtgaaggagctaaaattttatctgcatcttcccattatttattcggttcattgggcaacatcgtactcggagcagcgattacagtcgcatgtttaacaacaagcatcggccttgtcacatcttgcggccaatatttttcaaaacttattccggcattatcatataaaattgtcgttacgattgtcacgttattcagcttgatcattgcgaattttggactcgcgcaaattatcgcgttttctgttcctattttatcagctatctatccgcttgccattgtcattatcgttctttccttcatcgataagatctttaaagaaagacgcgaagtgtacatcgcatgcttgatcggtacaggacttttcagtattttagacggtatcaaagcagccggtttctcacttggatctttagatgtgtttctaaatgcgaatcttcctctttacagcctcggcatcggctgggtgcttccaggaatcgtcggagcggttatcggctatgtgctgaccttattcatcggaccatccaaacagcttaatgaaataagttaatgtcacagaacgcctgcgttattgcgcaggcgttttgtaataagaaaaagagcctgctcattacactgcgggctctttttcatggtcgtgattatctaagcggatatgtcagctttgattttttcaactgcacctggcgcagccttttctacagcggtagctgcaatttcataagagtcgtcataatcaaaagcataaaaacgtctttccgcttctttcagctgttcagataaaatatgattctggcttctgaaccggtttccgaactgaatgattttttcaatgaggatgacctgctcgacaagttcctctgattcccggcttgccctgttgacgatatcttctgcttgtttcaaatgggctccggcttcttccatatttaatggaagttcgtttagttgattgaccgtttcttgaatatgatgatgcgcgttctccagcatctcttgaatatggctcggaatgcctggaatgttgctagtcttcagcagtcttgctgtctcagaaattgtttttttcaaattgctgagcgtctccctcgcctgaagctcttcttttctcagcgcttgcagattttcacgatactcgtcatgctcttttttcacttcttcaatttgcttctctattgaagcaacttcttccactaaaagtgagtaggcaacatgctctgcatcgagcttatctttaacggatgatagcagcttcccaatttcatcaaggcgcttttcaaaagcctgctgtttgccgagctcaccggctgtcagcctgtagctttccttcaccagctcagtttccgccttcgtatgctctttctcttctttaagcttgtcgtaagcaataatcaattcaggcattttgcttagtacggattgaccggcttcaacttcgccctccagctgctgataaacagattgaatattttcgtcaatgagctgcaggattgcggacgcttcatcaatatccagctcagtcatcaggacatgttccgctcgtttcagctggtttgacagattttctaattccttatcaagctggatatgctcaagcttgtaccctttttctttcatttcgccatagccatccttgagctttgcaatctgtccgggcaccgtctgtttacagtcagctaacagcttcggcacatcatctatgtatgactgaagccgttcaagattgcggtcctgctcaagcagtacttttcttgcagtaatatagtttccgccttctgtttcttcttcaaattgtttgatgccgctccaaatttcgtccagatccttttcaaggctgtcataaagctccccgtaaaggtggctgtaagccagcaggttttttcgagatttcgaatagcgctccctcacctgttcaatctcttcacggctcttttcctcacttgtgacaagatcgctgatttcccgaagaatcttttcaatgcttgattcagccgctgtcagcaggtcgtcgatatgaacgagcacttgattggcctttttaaaccggtatttgtctgcattttcctcggcatcataaaggagctcttcaactttcggcatgtgggctgtgacaatctcatcccattcttcacgccacttctcaaagaactcttctgtctgacccgtcatttttaaatgttttattttagacatttcttccacgatcgaccgatttagaatttcaatcttccacgattccagccggtcgatttcggcgtagacttttttcctgaaaaagtagcctgccgcaaacagcgcaagcagtacaattaataatccaatgacaaactccataatgagcccccttgctgtttaccttaatctgtcagggtgttttatttattcagaaagatttcaggatatgtattgagaaaaactgtcgttttcattgttattatgataccatgtaacaaacattttttgaccagaaatcaaaaactttttgtgcaaaatcggcaggatttgactattttttcatggggtgacatcaatgcaaaagcgagacggacatattcacacaccattttgccctcacggctccaatgacacactcagacaatatgcagaagaagccttaaaaaaagggttcgaatcgattacttttaccgaacacgccccattgccgccctcttttaccgatcccacgccgctgaaagacagcgcgatggcgcaagcttctttggaacgctatattcatgaaatttccggattaaaaaaagaatatcgcggacagcttagtatacggacagggcttgaagtcgattatatcgctgaatttgaagacgaaattacattattcctggacacatacgggccatatttagatgacagcatcttatccgttcattttttgcgcacagactcttcctatctatgccttgattatgacgagcataccttcaaagagctgatttcagcctgcggaagcattgaagcggtatatgaacaatattaccggagtatctattcttccattgtagcatctctcggcgtttataagccaaaaagagtcggtcacatcacactcgtccaaaaattcatcaagctgtttccatacagcatgtcagaacatattcgcggcctcgtttccctgtgcctgaatgccattgaagaaaacggaatggagctcgacttcaatacttccggcttaagaaaaacttacgctggcggtatttatatcgaggattggatgctgaatgaagcgaagcaaaagaagatcccgcttgtgtttgggtcagatgcccatcaagcgggagatgtcggatatgcgtatgaggcgtttttggaacggtgctagttggtgagcgccacgtctcctgtccggaagacgcttctgatccaaatcttgatttcttcaaaatacattttataaaaatacggctcgtgcggctgcatgtagagtacttctgaaatatattgaggctggagatagggcatcatcaagagagattttaattggagaataaaatgaggcagcggcagcgttaaatattcacgctgtttttctccttcctcaatgatcagctggaagatatacttttccttcattagatatgtcgacataatttccctgattaatgtggagtcaattgtgacttcccggtagacaaaacgagttaattgacgatgattatgctgataggataaaatatcgaaaaccaattgaagaagctgttcctgagtgctttgagaagagatattgcttgccgctgtttcaagcgttttgctgtagccctcgtaaaactctgaaactaagtgttccatcaagcctcctttgcctttaaaatagtaggagatgtgcgcaacatttacatcagctgactttgcgatttcacggacagacgtgccagaaaatcctttttggttaaaaagcatgacagcagattcaataattttgtctttggtgcttactttcatacggctcactccttcctcttgatactattcaagcagaaagccgctgttcctgtaagaacttatcgacaaatgccggcagaaaagccggaactttgttttatattatagaaaaagtgagggttttccatgttccatgtcgaaaaacaatctggagataaagaaaaaggctatcagcttctgctaaaacagctcgaagccatgaccgaagacgaaacagatcaaatagctaactatgcaaatgcctcagcactgctgtatcattcgctgcctgaagtcaactgggcgggtttctattttgccaaagaagaggatggacagcttttgttaggtccgttccaaggcctgccggcatgtgttcggattcctttcggcagaggggtttgcggcacagcgtacgcaaacggaaaagtggaacgtgttgaggatgtaaactcgtttccgggacatatcgcctgcgatgcagcgtctcaatcagaaattgtgcttccgattcgtgtagacggaaaaattgtcggcgtcttggacatcgacagcccagtgaaaaaccgtttcgacgaaattgatgaaaaatacttaactcaatttgccgaaacgctagaaaaagcgttagcgcagtaatataaaagcccaaaactgatatcgttttgggctttttttattttattgagtcatgaaccatcaagcggtttttcccgctccgtttcgcgctgtagagcgcttcatctgcctcatgcacaagctctttcagcgacttttttgtttctgtcgtccagcaggagataccgcaggaaatggttacctcgggtttcgtattttttctgaccgcgtaaaccagtcgctcggtaatccgtttccccactgcaaccggcacatttggcaaataaatcgccagctcctctcctccccagcgggcaccgacatcatgctttcggatgttgcttttaatcactgaagcgacttgaattaaaatctcgtccccagtctgatggccgtacgtatcatttacatttttaaaattatcaatatcaacaagaataaaaacacccttttgatggattttcatgctgtattgaattttttcatctaaatacgctcgtgaatacagttcagtcagctgatctgttttcacgagatgctcaaggcggtcgcgaagcattgaattggttacagccagtgtcgcgtgatgaatcagcgcctgaaacagcttgtacatttcaaatgtaaaagcgtacagctcctgtttcaataaaaccgcaaagcctaaaagccggtcgttttgaatcatcggagcagccatcagcgagccgtaccccgccttcccaaaaacagactggccattcccgatgaaaacccctttttcaccttcatacagcttttctttcagctcattataaaaatctgacggcttcgcttctttaaaaaatgctgtgctgcctgggagcaatgttaggttttcaaaatggtctatatgaaaaaatcccacttcttctgcctgaaacgattctgccattctcacagccagatcattcattgtatcagtcaatgtcagccgctgattcaggcgtcgtgatgtttcattaatcaattccaaatttgcgatgcttgctttggattgttcgtagagctgggcattttcaaacgcttttcccgcggcgtttgctaacagcgacatttcatcaaggcaggcatcagtaagaaagctgtcacccgttccttcagccttcaacaccccgtatgtgccctgctgtcctttgatcggaatataggcgacagattcatttttccgcaaaatgtctccggacaaatacactttgagcgcaaaggaatcggatttttccccttccatatatagctcttttgcaggaatccctaaacattggtcttgatcgtgcgatataaataaagaaaactcaaaaagagaaaatgtgcttgtcaagctttctaaaagctgcttcagcacatctgtctgatcaagcagtgaatggaacagctctgtcattttgtatatctttttttggtagatcgttttgttatagagtctttcctgtttcatcgactggtttaaaaatgaagcaaccacgtccggaagcccttcaggaatctcttcatcctgcctgcatgcaagatggaaacgcctgccggagccgtcctcaatcagataacatgaagcgtttatttttgaagcggaaaaacgcgcttcaccatctgccagttttgtcacaaagtctgatggtgacggtgtaagcgaaacacacagggttgaaaaataggtttgaatagccgaagtcagccatatgaaagagtcggtgaatgtgactttttcagatttggttaataaaaaatcgagcatatgataatgaaaggcggataattgatctttagtttgttctaccatgtttttatcacctaaaagtttaccactaatttttgtttattatatcataaacggtaaagcaataatggaggaatggttgacttcaaaacaaataaattatataatgacctttgtgtgaaatattgcagcctttttgttcagcttctatgttttcattttgttccttatcaataaggtgtatcgtgtaactctctgctgctggagcgaggatacatgaaaacaaaatgtgcatggtcgaatagagcagacggtttttattttccacaaaaataaaaccaaaggaggagtcacattatggctcgctatacaggtccatcttggaaactgtcccgccgtctaggaatctctcttagcggtacaggaaaagaattagaaaaacgcccttacgctccaggtccacacggcccaggacaacgtaaaaaattatcagaatacggtttgcaattgcaagaaaagcaaaagcttcgtcacatgtacggtgtaaacgaacgtcaattccgcactttgtttgacaaagctggcaaactagctggtaaacacggtgaaaacttcatgattcttttagattctcgtcttgataacgttgtgtacaagctaggtttagcacgtactcgccgtcaagctcgccaattggttaaccacggtcacattcttgtagacggaagccgcgttgacatcccgtcttacctagtgaaacctggtcaaacaatcggtgttcgcgaaaaatcaagaaacctttctatcatcaaagaatctgttgaagtgaacaacttcgttcctgaataccttactttcgacgctgaaaagcttgaaggtactttcactcgtcttcctgagcgttctgaacttgctccggaaattaacgaagcgcttatcgttgagttctactctcgttaatcgttttaaaaacccctgccgctatgcggtcggggtttttttatcgtctgtttcgtcattcgcctcttgctggccaacactttcttgcgcctgctgctcccaatgatcccgctgcagccgttcttttgcaatcgtacacatgagattcacgctttagcgctcctttcatttaaaaggtggtgattggtcgtgtttgccctatctaatatactcttttcctttcattcctatgcggtaaacaaaaagatcctttgccttcagtggcaaaggatctttttcttatttatacgtcacaaggaagtattttttcttcccgcggcgcagaacagtaaattgatcttcgatgcggtcttcacctgatagggtataatttatttccgtctggcgttcaccgttaatgtaaacagctccgttttgaatgtcttcacgcgcttggcgtttagaaggagataatttagattgcaccaacacatctacaagtgaaagctcttgggtgctgtcaacttccatagaaggaacatctttaaagcctacttttacgtcttgagcagaaagctctttaatattgccgctgaacagcgcttgggagatgttgatggcttgctctagcgcctcgcgtccgtgaacaagtgatgtcacttcttccgccaggcgtttttgcgcttcacgtttttctggcgccgtttctgttttttcagcgtatgcttcaatttcctcttttgaaaggaacgtaaagtatttcaagtatttgacaacgtcacggtcgtctgtgttgatccagaattgatagaattcatatggcgatgttttttctttatcaagccagatcgcgccgccttccgtttttccgaacttcgtgccgtctgcttttgtgacaagcggaatcgttaggccgaacgcttttgctccttcttcttctgattttctgatcagttcaagacccgctgtgatattgccccactgatcgcttccgccgatttgcagtttacagtttttgtctctgtaaagatttaagaaatcataagattgaagaatcatgtagctaaattccgtgtacgagatgccggattcaattcttgagctgaccgtatcttttgccagcatgtaattgatgccgaaatttttaccaacgtcacgaaggaaatcgatcacattcattttgccgatccagtcaaagttgttcgcgatgacagctgggttttctgctgcttcaaaatctagaaatctggacagctggtttttgattttttgggaccattcggatacgatgtcagcagtgtttaatgtacgctctgctttttttccgcttggatcaccgatgaggcccgtcgcgccgcccacaagcgcaatcggatgatgccctgcaagctgaaaacggcgaagtgttaaaataggcagcaggtgtccgatatgcaagctgtctgctgtagggtcaaagcctgagtacaagcggattttttcttcattcagctgtttatttaacccttcttcatctgtcatttgctgaatcaatccgcggaaggataagtcttcaagtaagttagtcataagataaagctcctttttgattaaaataaaaaacgccccttcgtttacacgaagggacgattgattatcgcggtaccaccctactaataagagaatgcaaacattcgtcttatcactttgcctgataacggatcaggtccgttctttcactactgaaagcctggccggctttgtttgcaaaagcggttcatgagtgtattcgatatatccgtctgtgctgattttcaccggccatcagctctctggaacgtaaggatattctacttgtctcaatctttaccttttcatatgaagctatatcatttttaacataaataaaatcctgtgtcaacgccgccttttaatcctccattgttgacagatctccagccggcagattaagctcccatgccttcagcacgcgcctcatgatctttccgcttcgggttttcggaagcttatctttaaattcgatctcacgcggagccgcatgggctgcaagaccctgctttacaaataggcggatctcttctttcagtttatcagacggctcaaatccttccctgagtgcaataaaggctttaatgatttctccacgcaccgggtcaggctttccgattacgcctgcttctgcaatagccggatgttcgacaagcttgctttccacttcaaatgggccgacgcgctcaccggaggtcatgatgacgtcatcaactctgccttggaaccaaaagtatccctcttcatccatgtaagcagaatccccagacacataccagccgcccggcatgaaatacgattcatacttttcagggttattccaaatggtatgcatcatggaaggccagccctttttgatggcgagattgcccattcggtacggcggaagctcgttgccttgattgtcaacgatcgctgcctccactcctggaatcggcttacccattgaacccggtttaatatccatgcaaggatagttgcagataagctgactgcccgtttctgtcatccaccatgtatcatgaattcgtttgttaaaaactttatgtccccatctgatgacttccggatttagcggctcaccgacactgagcacatgccggagtgaagttagatcatatttcgcagccatttcatctcccgctcccatcagcatccgaaaagctgtcggcgcgctgtaccagacattgacgccaagctgttcaatcgtaccataccagctttccgggctgaaacgtccaccgacgatgacatttgtcgctccgttcagccacggtgcaaaaatgccgtataccgtacctgtcacccagcctggatcagccgtgcaccaataaatgtcttcttcctttaaatcaaggacccactttcctgtttgatattgctgaatcatcgcttcatggatatgcagcacgccctttggcgtaccagtggaacctgatgtatagtgaagcagaaagccgtcttttttatccatccattcgatatccagtcttgtgctttcctgtttcgctgcttcatcataattgatgatattcgtgccgctctcagcctctcccccgactacgaagacatgctgcaagtgaggcagtttgtctaccggtattctctccagcagctcaggtgttgtgacaacaacctttgcctcactgttttcaagccgatctttcaccgctccctccataaatgcttcgaacagcggcccggcgatggcgccaattttgattgcgccaagcataataaaataaagctcgggtgatctcggcataaaaataaaaacgcggtcccctttttccacatttccataccgtctcagcacattcccggctctgtttgattcttccttcatttctttaaatgtgtatttttcatcccgttttgcgtctttataataaagcgctactttgttttttcgaaacgattcggcatggcggtcaatcgcttcatacgccgcattcagtttccctgtctcatgccaagagaaatgtttctctgcctcggcccaatcaaaatgccggtacgtttcttcatagttttttaagttatgatccccctctattgctggtaacgctttcaaattcatgcccaaacatccccctttgctgaagttgtcacaattattatagtatatattcatattcttctcaatttttaaaatataaaccaggttgaaaacgctttataatttggtattcttaaagaaggcatgtatttttgataagaattgatgggacggtgaattagtggaacatcataaaacataccattcagcaaacatcaaaacagcaaccggctctttactgatagaagggcctgtctctccagaggatttggcaggttatgagtttcataaagatttaaccgcatttcgcccgcctcgcgagcagcatgaagcgctagtcgacattgcaggccttcccgaagggcgcattattattgccagagacggccgaaccattgtcggctatgtcacgtatttatatcctgacccgctcgaaagatggtctgaaggaaatatggaggatttgattgagctcggagccatcgaagtagcgccggactatcggggatgcgctgtcggaaagacgctcctgaccgtcagcatgatggatgaacaaatggaaaactacattgtgatgacgacagaatattactggcattgggatttaaaagggatgaaaaaagatgtgtgggaatacagaaagatcatggaaaagatgatgaatgcaggcggattggtctggtttgcaacggatgagccggagatcagctcccaccctgcaaactgtctgatggcccgcattggaaaaaacgtcagccaagaatcaattgagcaatttgacaggctccgtttttatcatcgttatatgtattaactgacactgacaaaggggaaaaaataatgattgttgagcaaatcatgaaaagagatgtcattacattaacgaagacagatacgcttgaaacagccatatgcaaactgaaggaattccatatcagacatctgcctgttgtagatgaagaacgacacgtgatcggcatgattacagacagagacatgaaacaggccagcccgagtatttttgaagaaaacaaacgaagcctatttctcacacgaagcgtagattcaattatgaaaaaggatgttgtctgcgcccacccgttagattttgtcgaagaaatatcagccgtgttctacgagcatggcatcggctgccttccagtggtgcaccatcaaaaattaataggcattttaacaaaaaccgatttgctgcggacgtttgtcaaattgacaggcgctgaccagccgggatcgcaaattgagataaaagtaaacgacatcaccaaaagcctcgctgagatcagcagtctttgccaagaccttcaagtgaaaatattaagcgtgcttgtttatccgcatgacgatcccggtgtaaaagtgcttgtcttccgtgtaaaaacgatgaatccgctgccgtttttgcaggcattacaaagaaatggacaccacgtcgtatggccgtcagagcaaagggatctgctatgagagacagtgtatttatctattctccatcctaccaaacctatatgtttcatcaggagcatccctttaatcagcagcgggttctgttaacatatgatttgcttaagacgatcaatgcctttgatgatggagacattgtcacccccagactcgcttcagaagaggagctttcccttgtccacacggacgattacattcaggccgtaaagcttgcgggcgccggaaagcttcccgctgaagaaggagaaagctacgggctcggcactgaagacacacccgtctttgccggcatgcacgaagcggcatcactcttggtcggcggcactttaacggccgcagactgggtcatgtcaggacaagccctgcatgcggcaaaccttggcggagggcttcatcacggctttcgcgggagagcatcaggattctgcatatacaacgacagcgctgtggctattcaatatatccagaaaaaatatagcgccagagtgctttatattgatacggacgcccaccacggggacggtgtgcaatttacattttacgataatcctgacgtatgcacgctgtccattcatgaaacaggaaggtatttattccctggaaccggccagatccaagaaaaaggcagcggaaaaggatatggctattcctttaatattccgattgacgcttttacagaggatgattcttttcttgaggcttaccggacagcagcttcagaagtcgccgcgtatttcgagcccgatgtcattatcagccaaaacggcgccgatgcccattactacgacccgctgacgcatttatcagcaacaatcaatatatacgaagaaatcccccgtcttgcacacactttggctcatcaatattgcggagggaaatggattgcagtcggaggcggcggatatgatatttggcgtgtcgttccccgcgcctgggccagaatatggcttgaaatgaagggaattgacccgggatacgagataccgccggaatggattgctaaatggcaaaaacaatgccccgtggcccttccgtcgagctggagcgatccggctgatttatatcctccgattccccgcaagcctgaaatcacagaaaaaaatgcccaaactgtcagcaaagcattatatgcgatacgctctgaacagcaaagaacaaagtaaaaaacgacctttacgaagaggtcgtttttgattttttgatcactatttccacacgccgattttccttcatgtgttcatttgtcttgttatccttcaccggctttgtatccgcataaccgacagcaataaagcgcttggagggaagcttctcttttgacgtgaagtattgaatcactccacttgcccgtgctgctgatagctcccaattcgacgggtatcggtatgtcgaaatgtttcggctgtctgtatgcccctccacctgaatgtcatttggaatggtttgaagaagaacggcaatttggtgaagaagtgtttcggcatttttcagcacctttgcctcacctgtatcaaacagcacagcctcctgaagaacgagcacgacaccgcgttcatcccgtttggctgtcatttgggccttcaaatgattgtcttttatatatgtatttactttcttgagaagctgatcctgctgatcctcttgcttcttcgtatcagatggggatgtattctttttttctatggatgtttggtccggctgaagcccgttgccttccttctggatcgagtccactgcagctttgaatttttgcagatcgatttgggacatcgaaaagagtaaaataaagaacacaaggatcaaggtgatcagatctgtaaaggttaccatccagctggatgaagattgactgttttttccgcttccattccttctgtcaaaacgttctcttctaagcttcatgtacagatcccttttttgtttttacttgttttggctgcttcttccattcttcccgtgagctgaaaacgaccagctggctttcaaggttgcgcgggttttttccggattgaacaccgataatcccttccaccattacctgcttgatgaaaatttcactttctgttttctcttcaagcttagccgcgatcgggttgaagaccatatttgccagtaatgaaccatataaagtcgtcagaagcgcaatggccatgtttggtccgagcatatgcgggtcgtttaagtttttgagcatcagcacaagcccgacgagtgttccgatcattccccatgccggagcgaattctcccgctttttcaaaaactcgccgcccttttcggtgccgttcctccattgctgcgatttctgaatccatgacgagccgaatcgtttcttcatcccagccgtcaatcgctaaaagcagcccttttttcaagaatggatctttgatttcccgagcctgatcatccaatgataaaagcccgtgttttcgcgcgtgatcggaaagggaaacaaaggttttcacaagatctttcacattgtcttcctggcggatgaatgcctgctttaacacagagggcgcttttttcagctctcttggcggaaaactgataaaaacagcggcgcaaagtccccctgttacgatgaagaaagaggtcagatcaagaaaagagcggaaaccgcttactcccgatcctgaaataatcccgataacaataataatcgttcctaacacaaatccaacaggtgtaagataatcaaaacgtttcatcatttctccccatgaaaaaagcaagaattcaccataaaggtgaagcttgctctttgtttttcttatgacttggttgactttctaagctctatacggtgcggcagttcgacgatatgctcttcaaccggctctttattcatgagcttcgtcagcagtctcatcgcaacggcgccgatatcatatgtcggctgaacaactgttgaaagctgaggacgaaccatgaggcttaatcttgtattatcaaaaccgataatgtcgagatcctccggaatggataagccctgatcctgagcggcatggataatgccgagtgccatttcatcagttgcagaaagaatggctgtcggttttttatccaggctcatcagatgctgcagtgcttcgagtccggaatcatatgtgtaatccccttcagctacaaattgttcattaaacggaaggttcgcttcttcaagcgcacgtttgtagccttggagttttttcgaacggttgatcggttctgccattggtccggaaacgaacgcgatgtctgtatgtcctttatcaaccaaaagcttcacggcatcataaatcgcctgttcgtaatcgatagcgactgacggtgtttcctcctgctcttctacagaagcggcaagtacaatcggcactggagaacgcttaaattccgccacatgctcgtccgtaatgtttccgcccataaacacgatgccgtccacttgtttgccgagcattgtgtttaacaagtgcagctctttctccatgttttggtcagagttgctcaaaataatattgtatttatacattgtcgcgatatcttcaattccgcgcgcaagctctgaatagaaaatgcttgagatatcgggaatgatgacacctacagttgttgtttttttacttgccagtcctcttgccaccgcgtttggacggtaaccgagacgttcaatggcttccaagacttttttcctcgttgtcggttttacattcgggttgccgttcacgacacgggaaacggttgccatgcttacattagcttctctcgctacatcgtagatcgtaatattgctcatcctaaaaccactccttttactggatacacttatccttatctatagcataaacactttatgtagagaaatgtcataatgtccgaatttatgtcgtttatgatttgtaagcgtaagtcagtagtgtacattatttttcattattcatcaaatttaattacttctcatgaaattatacacgtttttatagatgatgaaaacgtatacttggtttttataactaaataaacgagaaagcataaaaaaaggccgcaggcgcggccttttggattgttcaattaagcgttgactttcaccattggcttcagttcattcagccatttttcgaattcaggaatcgccatttgctgagcagagtcagaaagtgcgactgacggatcagggtgaacctcagccattacgccatctgcaccaatcgctaaagcggctttagctgtcggaagcaagaggtcacggcggcctgttgaatgcgtaacatcaacaaagactggcaaatgcgtttcttgtttcaaaatcggcacagctgaaatatccagcgtgtttctcgttgctgtttcatatgttctgattccgcgctcacaaaggataatttggtcattcccttgtgacatgatgtattcagcagcattgatgaattcagagatcgttgcagcaagaccgcgcttcagaagcactggctttttcacggcgccggccgctttcagcaattcgaagttctgcatgttgcgcgctccgatttgaatgacatcaatgtagtccagcgcttcttcgatatgagccggagttacgatttcactgataaccgccagatcaaattcatccgctacacgttttaaaatttgaaggccttcaacaccaagcccttggaaatcgtatgggctcgtacgaggcttaaaggctccaccgcgcaaaattttaatcccttgttttttcgcagctgcagcgacttcagctacctgctcatagctctctactgcacatgggccgacaatgaatctttgctggccgtctccgattttttcgcctttgatatcaacaattgtatcttcaggttttttcttgcgggagacaagcagcgctttgctgtgatcttcttcctgaagctctaaaccggctttgaatatctctttaaaaatgtgctggatggttgaattttcgaacggcccgtcattgttttcaatgatattgtttaacattgtgcgttctctgacagggtcaaatcggttgacgccctgtgcttccttcgctttaccgatctcttttacaacatttccgcgttcgttgattagttttaaaatttgtaggtttaattcgtctgctttctgccttaaaagctctaactctgtgttgctcatttttttcatcctttccctgcacattcattttttattttgtagttatcatgcatcttactataagtaattccaaatggaaatactgaaatacaaaaaattttataaaaactctactttattacccaaacgcttttaagtgataaagtaatctatgaagctatcctacatgatgtgagggcaatgttcaagggttttttacaaaaaaaagcgccagatgatatctggacgcttttttctatgacaaatgctgctcaatagcggcttctgtaatttgtgaatgtgaggtatgccatttcacttcaccgttctggatgatgaatacctgagggctttcatgcttgaccccatatgtttctgcaatgaaattggacagcggccgggcttcttgtacttgaagatagtaagccggcacatcctcatgctgatttgcaaaggcatcaaactcatgaaatgctgcctggctgatcgggcatgtggtgctgtgtttaaagaagacgaaaacgccttcctgttctgcaatccgtttaaattcttcctcagattgaataagctgtttagccatgactcaagctcttccttccctgctcagcgattcaactgctcagcctgtttttgtgcatctttcagttcgtcttttacatcttctttcgtctggaggacttgatcttttgtttcatcagccgcctgcatcgcttcttccctcatatcctgcattgcagtcgatgaatccgttttgtcagatttggaacggtctctcaaatcctttaccttgttcatgatctgtccagactgatcggctacaagctgtgtgatgttggaagttttgtcttttgcgatgctgacatattgcgtgcctttttccttcgcatctgccgtcattttatcagttttgtcccgtaaggcaacagcctggctgccgagatcgtcgcgaagttctttgcctgatttaggtgctagaaaaagagctgtagtggcaccgatgattcccccgattaaagttccgattaaaaaatctttactattaattccatctttgctcatcattattcctcctcttagtatttttttctcttacagggctgattttttcttttgcttccatttctcccaaatttccattgctgcttgactccaagtgacaacttgattgatcttatcttgattttctctaactgatgccgatacagaccctgccgcttgtttcatggatgtattgaactgctgtacagaagctcccactccttgaacagcatgaacgaccgtgttcagcttttctgatttttcctgaatatcttcagccaggcggttggtcttatgtaaaagctcggctgtttcagttgtgatgcccttcatttgtccctccagcccttcaagagtggatgcgacgttttttagtgtcagctgcaatgacttcagtgttttagacaagtagatcactaatacgagaaatgcaactgcgatgagtgcaacgctcaaataaagaataataatcatctcaaacctccttgctgcaggatatactgctgtttacccgttttcttcaatcataaacatgtgtactgggctgtatacatactattctccgttatgtaagaaaatcctttaataagcttttccatcagataaataaaaagcagtgagatcactgctttttattatgccatgacgttttcgtaggctctcatatatttttggatatctcctgctcccatgaagatgagaacggctttatcatgagcttttaaaacagatgtgtcatcttcttcaatcagcttggcattatgaatttttccctggagatcgccgatcgtcagctttccggcattctcacgggctgagccgaaaatatcgcataaatacacacagtcggcgccgctcaggctttctgcaaattcgtcaaggaactgctgcgtccgtgtaaatgtatgaggctggaataccgcgacaatttcccgatcaggatacttctgtcttgccgcctcgattgtcacttttatttctgtcggatgatgggcatagtcatcaatcagcacttgatccccaagctgcttctcattgaatctgcgtttgacgcccccaaaggatttgagagcatgcttaatgatgctggaatcaatttcttcataatggcataacgcaatgaccgccaatgagtttaatacattgtggtggccgtacgcaggaatataaaacgtatcatagaacgtattgcggacaaagacatcaaaagttgtcccttccgtgctttttacgatgtttctcgcttgaaaatcattttcttcccccgtgccataatacacaaccgggacgttcgcatggattttcggcagatgctcgtcgtctccgcaggcaataatgcctttgttgacttgaagagccatctcttggaaagcgtcaaatacatcgtcaatgcttgagaagtaatcagggtgatcaaaatcaatattcgtcataatcgcgtaatctggctgatagcttaagaaatggcggcggtattcgcacgcttcaaacacaaagtattcgctgttttcatttccctggcctgttccgtctccgattaagaaagacgtcggttttgcgttttggatcacgtgagccagcagacccgtagtcgacgttttgccgtgtgcgcccgtaacggcaacactcgtgaattttttcatgtagtcgcctaaaaacttatgataacgtatcaccggaattccctcagacatcgctttttctatttcaggatgcgtgtctgggaatgcgtttccggcgatgactgtcatgccgggtttaatattctccgcgctaaaaggaagaaccgtaatatttcttttttcaagcgctgtttgcgtaaaaataaatttttcgatatccgatccttggacagtatatccattatcatgaagtatttgggcaagcggactcataccggtcccttttattccaacaaaatgataaacagtcataattgtacctccaacaaacgtctatctgttccccagtatatgacgctcatttcaatttgcgaccgcggcggctgaaaagcctcccttagcggcgtattttatatgttttgttatgtttagtatcaggttatttctttccgattaaacccagatatcaagatttgtctatgcacagctgctgtaaagcggcatagctgttaaatgctctaaacactatcataccatgtttggtgtgaaaatgaacccatattattcgtttattaaatcacttgctgtgatcagcacctcccgaggcttgcttccttttgcctcagagatcatgccttccgcttccatcatgtcgatcagccttgccgcacgattgtaaccgattctgaatcttctttgcaggcttgaagtgctcgcactgttttgctctacaacaaactcacacgcttcgtaaaacagttcgtcctcttctttcagggcagatccttgtcttacgagctcttcttgttcaaataaataggtcggcggcatttggcttctgacgtgggaaacgacgcggtcgatttcccggtctgacacaaagttaccttgcagacgaaccggttttcccgatccgttttccaaaaagagcatatccccttttccgagaagcttttctgcaccggctatgtcgataattgttcgggaatcaacctggcttgaaacagaaaaggcgattctcgttgggatattcgccttaatcagacctgtaatgacatcgactgacggacgctgagttgcgacgagaagatggataccgcacgctctggctttttgggcgatccgcgcaatgctttcttccacatcgtttggagccaccatcatcaaatctgcaagctcatcaataatgacaactaaatatggcagcttttcacccatttggtgttcagcggttaattgattaaagcggtcaatatcgcggacacctgaatgggcaaaaagctcatagcggcgctccatttcctcaacgacccatttcaaagcagctgtagccgctttggcgtcagtaatgaccgggctgacgaggtgaggaattttattgtaaggggccagctctaccattttcggatcaatcagcagcacctttacctcactcgggtcagctttataaagcaggctgactaatattgtattgatgcatacgctttttccggagcctgtagcaccggcaatcaagccatgcggcattttcttcaagtcgataacaacaggatttcctgaaatatctaatcccagcgcagctgtgagcggtgacttgcttgtcctgaaagctgagctgcgaatcatttggcgcaaatcaaccaccttgctcgtgcggttcggcacttcaattccgatcgtgtttttccccggaatcggcgcttcaatccgaatatctctcgctgagagactgagtttaatatcatcggacaagttggtgattttattcacctttacacctggttcaggatgcacttcaaatctcgtgacagacggaccctgggttacatggaccacattggcgcggacattgaagtttttcaaggttaaatcaagaagctgacgctgttcttcgatccacgcagtatcatcttgaacctgcgctggcgggacatcaagcagtgcaacattcggaaatacatagctgccgcggcgctcctctgctttttgctgtttatgcgtatctcttttcagcatcatcacattaaaaggaacggatggccctttttgagaagatgcgctttgttcagtccttttctcctgtacaccaggcctttttttcggctcttctgaagcttcgcgaggtttgtctgcgcgaattccctgccggttttcaagagttgcagtaaacgatttggaaccctgctccatgtgttcagttttctcaagctctgtatggctgtctggctgaacatctatcttcgtttcctgagcctctcccaggatgtcataatgattatttattatgctgtctgatggctcttctgattcttttgccacagtttctgcttgagccagagcctctgatgaatactcatgatcagtaaataaaggctcttcctgacgaatgtccatttgttcttcttgaacgaacggggactcagcaccttcttccgcgttttcatgatgattgtatactgggctgtctgacggctcttttgctttttcatcctcagatattgcctctgtctgagattcaggagctgtttgctcttcatcaagttcagcggagaaaacaggctcttcaaatttctctggctgctgctccctttgttcttcctcagccgttgcaggctcttcgcggcctacttcactgtctgaaagcccttcagccgccgtatctgtgagcatctcaggcggtgtttgctcttcggcatgttcagctgggaaggaaggctcctcttcttccggctgttgaacgcctgactcaaatggcactttgttacctgacggctcggctggccttttcgccagcgcctcatcattctccgtatcctttctgtttaaaacgccagaaggctgtttttcaaattgggtatccgggaagaaaggactttcttttttggaatgcgcctgtgtgtctgaagcaggatagccgcgttcacgttcgatctcttctgacagcagtgttaccttctcttttaccgatttatccggttcgttcaatgtttcagaaggctttttcggcacatcctttttaacagatggtttttgattgaatccatagacaggcgaagggatatttgtcggtttaaacggtttcttcgccggctctgctgcttgatatgtatgctgctcttcttcatttctgggacgctctctgtaaggtgcagcacttggacgaggcgcggatttcggttcgtccgatggtgtgcggcgccttctcaggtcatgatttttgtatccgtcaggcacgactggaaaacggaatttgccttttggatattcataatatattttaggatcttccaatctttttaattgtccttcaggatgatgtacttcttgttgctgcggaatttgagcgggttttgtctcccgttcagcatcctcttcgctttcgcctaaaaacaaatcaaaaaatttatgaagccaactcataatttatctctaactcccttatagttttctgggacggtttttagtataccactgctggtcggcccagaaaagattaagctatcagcagaaacaaagccgctaaacaagggcttagcggcttttcacatgattcgttttttttggcggatttatgggagtctaaaaccgaaatgcgtctcctgcctcatagtctccttctaacacaaggattcctttttcagcaggggcatccggcaaatcaagctctttcgctgagcagatcatcccgcttgacggaacgccgcgaagctctgcatccttaatgacaagtccgctaggcatcacagcaccgactttggcaacgacaactttttggccttggtcaacgttaggcgcgccgcagacgatctgaagcgtttcttctcctacgttgactttacatacgcttaatttatccgcattcggatgtttttcttttgattctacataccccacaacaaacttcggagataaatcaacgactaatgtttcttcaacgccgtttctgtttaaaatctcattcacatcttgcacgaatgtttctgagagcgcaacagggccgttttcatcaatagtcaagtaagaagacgcgttgaaaatgttgaagcccgttgtttcttttgtttcgttattgaaaattttgacgacgtcgccgtgtttttcatagcctaattgttcgcgtgtcacatcttgaagagagatcaggagcgtgtctcccacaccttctttattataaaaagcgttcataagtaaaaatcctttctaatcctttttcggacggcttttcgccaggataaacaccggttccagctttccttcattgtacaaaaatgaaagggcggtaatcgggacggtgccgcctgcaaagaagctcatcgacatttgtcctagaatatcataccccgattcattccggatgtcagcaagaatcaaaacgtcctgatgaggaacagagatcgccagctccccttctgcatgctgcttatactcatttaagatcgcttcgttcaaaatccggcttgcgtcgtatccgtcgtttgccctgaagaaataaaagtaattgccggcaaccgtatcttctttgacaaccgtcggcagggaacggagattaaatgcggccgtctctctgatccgctcttttgtccagttttctttctcaagcatgcgctggtcaattaaacggtaggttttcccgagatcaagcgcgtaataaattcttgtctctgcggtatgatcgtcataaatgagcgggatatcttcactggacttgtccgggaaggaagtcgagcggatgaccggataaatgcgagtttctttcccggtcatttcctgagccttcccttccattgccgtcatcgcttcagagacatagtacacgatctcatcaatggcttcgtcttttttcagttcccattttgcaataatcggcggcaaatcgagtgtaatcccttttttagtcgtttgatcctcaacacggagggtgtctttttctctgtcaaacagaaaggagcgattctcgtgctgaaggcgctgtttcagtatatctgacagcttccttgaggtcattttcaaaccgatgtcctcctttacgctttagcgagagagtctgttaaaaactgttcaatttcttcttttgttttgcggtctttgctcacaaaacgatttacttcttttccttcattaaacaccacaaagcttgggattccgtaaatttcccactctgcacatgtatcaatgaatttgtcacggtctacgtagtagtaggtgaattcagggaaattcgcttccaattcaggcaggaaaggctctacaaaacggcaatccgggcaccaatcggctgaaaacataaatacagaccaatcatcctttaccgctttttccagctcttgagttgattcaatttttttcatttcatatccctccagttgtttatgttcttacatgttttttatcgatactcgtccatttggatcataccaaactgcttgaggcaaaaccacttatatgcaacgaatgaatatgtaagattggctttcccattatcattatcatattttatttgcattatcaagctcgtttcgtttaacatcgtgtacatgagggtaaaatttacagatggacatacataaggagggatttttatatggagtttatcgtctatttagcaggagaaatccacagcaattggcgcgaggaaattaaagaaaaaacaaaatcactgaagctccctattacgtttgttggcccgatggagaatcatgaccgctcagacaatattggtgaagaaattatgggcgtacagccaaatgccgttttaaaggatgacaaagcctctgacatcaacaacttcagaaccgccgtcctgatgaataaagcagactttgtgatcgccctgtttggcgaaaagtacaaacagtggaacacggcaatggatgcatcatatgcgatcgcaaaaggaaaacccctgattatcatccggccagaatcgctccaccatcctttaaaagagctttccaataaagcgaatattacggttgaaaccgttaaccaagctattaaggccctttcctatctatttgaaacagaataagaaaaaagcttgtcgatccgggcttactgctcgttcaacaagcttttatgaaacctacatattttctttaatcgcatccaccgtctgcttatcgcaggctgttacaagtttgatgagcatttctttagcagcagcataatcatcaatatgaatgatagaagcgtttgtatgaatatagcgggaacatattccgataaccgctgacggcacaccgctgttcgaaatatgaaccttgcctgcgtctgttcccccgccggatacaaaatattgatatggaatatcatgcgtttcagccatatcaagaacgaattccctcattccgcgatgcatgactgtcgttctgtcaagaatgcgcagcaaaaagccttttccaagctggccgaattcatttttgtctccgctcatatcgtttgccgggctggcgtcaagggcgaaaaacaagtccggtttaatcatatgagaagccgtctgcgcgccccttagccctacttcttcctgaaccgttgcacccgcatagagtgtattcggaagctctttaccgtgtaattccttcagaagttcaatgcttaagccgcatccatatctgttatcccatgcttttgataaaattttcttttcattcgccatcgtcgtaaacggacaaacaggcacgatctgctgtcccggtttaatgccgattttgatggcgtcttccttatcatccgctccaatgtcgatcatcatgttcttgatatccatcggacggtttcgctgcgcatctgtcaataaatgcggcggtatgcttgaaatcacacccggaaccggcccgttatctgtttgaatttcaacccgctgcgcaagcaaaacctggctccaccagcctccgagcgtctggaatctgagcagcccgttgtctgtaatggatgtcaccatgaagccgacttcgtccatgtgcccggctaccataattctcggtgcgtcctctgcgcctcgtctgactccgaaaacacttcccagtctgtcctgaacgatgtcatcggcatatttggctagctcctgcttcataaaagcacgaacctgatgctcattgcccggcgcgccgggaagctgcgtcagtgtttggaaaagcgctttcgtttcttgattcatgttttcccctcatttctatgtagtccttttattttattagaaacaatgaagttttccaagcaccctgacccaatctgctcgatcagccgcgtattgcttaacaggatttggctgtttctgtataatgaaaagtacgatcaaccaggaggtgctttattttgaaattgcgtcatcttcttttaggagcaggacttggaatttgtacggctgtcgttgtgaaacaatatgtgatgaagccttatatttcttcagaaaaagcgcttcgaattgtaaagtctgcttttaagcagcggggcccgattgacggatcatggatttacacccagccggagccttacaatattaacggagaaacggtacaggtatacaaaaccggcattacacgatcagctttcggagaattagaacagtatgaagtcatggtggatgcgaaaacgggagaaattgttgatgtcattgatacaatcgcctcttaacaccggacaagcaaaaaatagaagccgctgcctacgcagcggctcttttttattatatcgcgcgaatcggtttgtataccggataccacatcgcatcctgcactgcctgtataatgtcttcaggctcttccgtagcgacgccttccttcattgcggtttttgcaacttcaacagcaacggttgccgaaacagtgcgcaaatcttcaacttttggaagcatcggcgcgccaggcaccccgacattgaccatacctgcgattgcccgggcacatgcttcaaacatgccgtcggtaattaattttgatttggtaacaatcgttccaagaccgagaccagggaagacaagcgcgttgtttgcctgcccgatatgatacgtaactccgttatattcaactggcgggaacgggcttcctgtcgtgatcagcgcacggccttctgtccattcgattaaatcctccggttttgcttcagaaagagttgtcggatttgacattggcaaaatcgccggccgtttcacatgtgacgccatttcttttacaatttcttcagtgaaagcgccggaaaccgtagatgtgccgatcaggatcgtgggtttcgcctgccggaccacttcaagaagatcaatgcctccgccgtctccgttccgctgataatccttcacttcttcagccgaacgagcatacggcttttggaaatcaagaagctgatccatatcatctgttaacagcccgtttctgtctatgcaccagaagcgcttgtatgattcttcttcactcagtccctcgcgcaccaatgcttcccgcagctgttcggcaattccgattcctgccgttcccgctccgaatataacaactctgtgatccctcagcggaactttagacgcttttgcacaggataagactgcggccaaagaaacagcgccagttccttggatatcatcattgaaggtacacactttatctttatagcgtttcaaaatgcttcgcgcgtttttcgccccgaaatcctcccaatgcagcaatgcattcggaaatgtttctctcgccagcgcaacgtagtcgtcaataaattggtcatagcgttcgccgcgcactctggaatgctggttgccgacataaagcgggtcgttcaagaggctctcctgatttgtccccgcatctaaaacaactgccagcactctgctcggatcaatgcccgcagccgctgtataaaccgccagcttgccaatagaaatcgcgattcctccgacgccccagtcaccgattcctaaaattccttccgcatcagtggcaacaattaaatcgatcgtatcgctttgatctttatactgtttaaatgcttctttcataccgtccgggtcatcgattgacagatagagccctcgtggttttctgtattcatggctgtatctctggattgccgttccaactgtcggtgtatagacaatcgggagcatttcccctaaatggtcatttaacaggcggtaaaacagcgtttcattccgatcgtgcagcgccgttaaatagacatttttgctcaaatcgtcaggctgtgcggaatattgttcatacgctcttttcgcctgatcatcaattgttaataccttgggcggcagaaagccttttaaaccaagttcttttctttcttcctcagtaaaagcaacacctttgttcaaaaaaggaacagagagcacttcaaggcctcttaatgttgtttgaatgtctccttcgtttgttactctgaattgtttcaccctgcctcttcctttctgagcataattagtactaggtttgcattattagccggaaaacatgcagggtaaacataaaaatatgctatcgcttcattcgcttaactgactttttgatacttccgtcctcctcccattgaagggcgcgatactcggcatcatggtaaaaaataaaccaagcatctttttctgctgcgaacgcctgccatttctgcttttgcgggatagaggtcatcggataatcatcgtaagccagcacccatagcggattgcggtgggcatgtgtcggcatcagatctgccatatgtacggcagtttcacccgcatcctcgcatatcaggacactgtgtccgtcgctatggcctccggtgtgatgcattgtaataccctctgtgatcgttaaggtgtcttcaaaggttttgacttggccagctacagcctcccaattttctttccaatacgtatttttcgacctgatattcggatggcgcatttcgtcccattcaacagctgatgtataaatcactgcattcggaaagacagagacgagccgttcaccttcatattccgttaaaccgcatgcatgatcaaaatgaaggtgtgtcattgcgatcacatctatatcggcaaccgttaatccgagtgcagctaatgagggtttcacattcgactcttgtgtcacgccatagtttcgtttttgtttatcagtcagcttgccgtacccaattccggcgtcaacgatgatattgagcccatccttttgaatcaaaatagggtctgtccttagttcaatctggtttttttcattgactggatattttttagaccaaagcggctttggaacgacgccgaacatggcacctccgtccatatgcgtcacgcccccgtcaagccaggtcaacgtgatattaccaattttcattgtttccattttcatcccccctgtcatcatggtagcaaacggcccataaaaaaaacagactcctgtcagagtctgtctttacgttctccattcaacctcagcccgatagatcggctggccgagtgcagagaatttttcttcatattctgtcataatattgccttccagattgctgttatgcaaatcgaggctgacgtatgtcagcagcaggccgtactcagagaagctcttcaaagagtactcaaataaacctcggttgtccgttttaaaatgaatcgatccgcctttgcccattacttcttcatattttttgaggaagtgggaatatgtcaagcggcgtttttcatgccgtttcttcggccaaggatcagaaaagttcaagtagacccgtttcacttcccccggctcaaacacatccgtcagcgtgtccgcatctatattcagaagctttacattctgcgcttcgctgtcttttactttttggacggctgtcacgatgacgcttttaaataactcaataccaatataattgatgtcgggattttgtttggccataccagaaataaattggccttttcctgtaccaacctcgatatggatcggattgtcgttgccaaacactgtgttccatttccctttataatcagcaggattgctgatggcaatatctgcgttttcagccaaaaagtcatcagcccaaggcttgtggcgcattctcatatgattgacacctctatctattatttcgactaacaacataccatgaattaaaaagacccgcaagctcgtttttccagtgtatctctcttaaggccgagcgcataaaaaaagagggtcccgtctgctggaacactcctttcacatgtataaaaacgctctgttttgaacaatttaacccgtatgatactgaagggatgtgtaccgttatgggtttacattatgagcatcaagttcatttattgaaggatatcttgactgaccatcaattggactgctgcggaacagtcgcagagtacgagcagcttgagcgtgtgattaaatcactgatggcaaacaccgagcttgattcaaatttcaaaaacgtgcttgaagatgtttaccgctacagccaatcaggaatatcgtccaaatccattgactcacacatacaagagcatcagaacagcctgtctcaatgggtagagcaaatggattcgtattcctgattaatcaacaattcgtttcatgaggatatgcagctcttccattgcatcatgaaattccttatcattgccttttgctttatgccaggcaatgaaagtaattgtttcagataacacataccaagccattcgcaaccgaaggctttctgtcagctctatgccgtacatgctcagccagctctcccaagctggcttttcgacgtagtggtacagcaaaggcccgaggtccatcgccggatcagcgatcatggcgccgtcccagtcaattaaatacagctggttgtcttcagacaatagccagttattatgattgacatcacaatggcaaacgactttctcaccgaaatgcacttcatgcaggtgttcttccaaatacttgatcccttcttgaatcagcggcgaagattgctgcacagcaaatacagcctgcttcagctgagacaaaagagcccccgggttcagcggttcttttccaagtctcttcagcatgtccagcaaggcttttgatgtgtgtattttacgaagcaattcagcaacgggccgtccgctcatgtctttaggcttcagctctctgccggtcatccagtgctgggccgtaatgacgtccccattttccatccgttttgtccaaaccagcttcggaacaatgccttcggcggataaaacagctaaaaaaggtgagctattacgttttaaaaaaagctgctgcccgttatgtttcgcataatatgcatctcctgtagctcctccggcggggaagatctcccaatcgctacctagtaattgtcccaaccagttcatatcaatgttcaacccatcatttcttaaaatattttagaattaaggctaatcgtttctagtctatccagcgaatgcctttttcgtacgaatcgtataaaaataaaaaagacagctattgagagtctcatatgctaatcaatagccgtcctttaaattttagcgctatagcacaaacttcgtcaagcaaaactcttaagatctgatgctaaatataagataaccgttccgatgccgtttactgcaaccgttttcttgatttctgccgggtcttcctgaaatcctgatggatcacataaaagccgataaggtatgtcgtttggcagcctccactcgacggagtctggactcgcgtgatggataacaatgatatctttccattcgtcaacctcgtcaagatcataaagcctgtatgcgataaggtgttcttttagcgtcaagcattcaagatggcgccggatgtctgcagcggacctaagacggaatgcaggatgcgcttttctcagcgagatcagcctgcggatatagtgaacatcttctttgaatgtttcgcggcgatcccagtcgagctggttgatgctgtcactggattgatagctgttttccactccctgcttcgtccggaaaaattcctgaccgctgtgaataaacggcaccccttgggcaagcaaaataatcgcggctgcaagcctttgcctgcttcgctttcggctgtcattttcttgaggaagcgcgaagctcattttatcccaaaaggtgtgattgtcgtgtgattcgacataattgatggactggcttggttccggaacaatcggtgctaatgccttccatccggaagacccggcaattccatgcatcacagcttgtgctgattcactgctgccgagcgcaaaccctgctgccttaaggtgaaaggtgttcccttttacagcgtcacgaaacatatcattaaaaaagccgatgcccggcattcttggcgcgttcgccaaagcagctttctgttcatgcggcagcggtgtagccagatcccacccttctccaaaaagcaggattccgggctttgccttagttgctttctctttcatataaagcacggtgtcaatatctaaaatcccgaggagatcaaagcggaagccgtcaacgttgtattcttcaagccaatagaccacgcaatccgcaatgaactttcttgccatccttctttctgatgcgatatcattgccaacgccggtgccgtttgatggcatcccacattcgtcgtgccggaaaaaataacctggcactgtcttttcaaagggggaattctccctcttatacacatggttaaaaacaacatccagaatgactcgcagaccgtgctgatgcagggtattgatcatttgtttcagctctgtttttctcgtttgaggatcatgagggtttgaggcatagcttccctccggggcaaagaaatgaagcgggttatatccccaattgtatgcatcaagcggcttctcttcatcaactccggcaaaatcgttcaccggctgcaactctacatgagtaacaccgagctcttttatatacgccagtcccgaagaactgccgtttgcggtttgtgtatccgtttccgtcagcgctaagtattttcccttgtttatcatgccgctgttttcatggatggagaagtcgcgaaggtgcgtctcatagatgacggcatccacagggtgtgagaatggtttaagaggagcagtccatttcatttgatccgggcgcaagacgacgcccttctctccatttacagtcacagccttggcatacgggtcaactgtttccatccattctaaattgttgcagatgcaaaacaaatactcatacccgtgaaggtcacccgtgaccgtaacagcatagacacccttttccaagcgattcatttggaatgtgcgcccgcttttattggggtgtgaaagcttgacagcagctgaggttgcagcaggcgcccatactttaaatacggtatgatccgcggtataaacggcgcccagctctccgtcataataaaattcgtcatcaaacgcagccgtccggatgaccgcgccaatttggagatccgttttgtggccgctggatgctctgacgcaatggatttttccaaatgtcacaggatggtcggatacgcagacgtacttgtattttgcttcaagggagtattcctccctgacagccagaggaaaaactgttgtttctgtctcaagccgaaacggcggtgtcatgatttccttttgttcagcaggaatcagaacagtaatgatattcatatcatcgacatacgcttcgaagctgcggcggatgctgaccatcggaagctctctcctccaaacacgtttatgttttgatccttaggggtgaaggactagatgccagacgaaacggggtagtgcccatgatttctccgtcagcatggaacgggattttgtccttcgtgtaaaatgtaatgtccttcgctttaaacatcgtaacgccatccatctttgtatgttttccaaatgccatgagacataaaagccaatattttttcaaaaacggctggttttcaacgattacgatatcaaatgtcttctcgcgcggatttgctaggggcgccgccttcatgcctcccccgtaaaacggatggttggatacaacggcaaaccagacatcatgaaattcgcgcgtctcgtcttccgtcgtacaagctaacgtaaacggcttaaaggttgccgaagcgtgcaaatgagaaagcggatacacaagaaatcgaaggcggagaaaaagaaaaacccgtctcaacggaaattccatcgcctttttattgacatatgcgtcaaacccgatcccgatgtgattcataaaataaagaatctgtgatttatcctgaaggaaattgacgctccctaaatgaaaggttcttgttaacgggcgctttaccttcttgatttcctgtatcagatcgatttttttaatagagaaccctcgcgaaaaatcattatacgcgcccgccggcacaaagctcagctcaatatcgtcaacatctttcagcccgttgacaacttcatgcatggttccgtctccgccaatgacgatcaggcgcttcagcttatattcctgtatcgttgaaatctgtctggcgagcacctcggcgtgtcccggatgttcagttaaaaatgaacggtgctcaacctttcgtttgatcaattctttttgaatggacttccaaacacgcaggccgtttcgatgtcctgctgtcggattaataataaaaaaccaatggctcatctttctcacctgcttatgttatgagaaaaccgctcaaatcgttctcttttactccagccactcctgtctgcgataggagtcagacatgcagtaagacaatagagcctttgcagcctttacctgatgatgtttgatcggagcagtgtttttcttctgccgctcaatccattcttccgcgctccgcttatccgctatttctaagccgtatggcggctccgggtaatcgatgtacgacgttctgctcagaagcaattttcgaaccggaatctcagcctgtttttcctttacgatctttgacacaaccgagtccgtacgaaacaggctaagccctggatttaacactgatgcagtctgagaggctgttttcttgtcccaaaaacgatttttagaccctatgtagacactgtcttcctcagcctctaaaaaagaaacgcaataaatttccagaggagaaataatcacaatgcttaattcaaccgccgcctgctgaattttcagcacaggcttatacataataaaataagaatcaggcagctgctgggtcagataacgcaaaatgcggtcctgcttcacttggtttgagagttgagatatttctgaaagagtagagcttgcccatttgagctgaaaatcatataaatgccttttataaaaagaagcaagcgccaccctgctcttcgggagccttacatgaatatcttcttcgtcctcaaaccattggtgtctctcttcttgtatatcggcttttatctcttcttttcttcttttcaatgaaaatttttttcgtttctgcaccggttccggttcttcagcactggcttgcctttcttcatgctggcgctccgctgcttctactagtgaaagccagcgctcttttttcaaacgtacaaactggttgatataatggtacggatcaagctcatatctcgatatataatcatgaattttgatgatttgtgccatgtttgtttctccactccgcaatgaattaagataattgaaatttgaatatttcctcgtattttggtgattggttcaagtgtatttgaaagagcgaaaatcgttcagccatcatcgaaacctcgccgctttcaaacggaacatgagctggaaatccattttcgcctgtccattttcttgccagcgtcatatgaggatgatacggtcttttttccacttgaaagccggcctgaaggacagcctgcttcgtatgttcccgcagtctatcaagcgttttgtttttctttggctccagatgtaaaacgcgcggccttctgcggtcgccgaatacatctatcttgtcaaactcaattgaaaatgggtcaatttctgaagcaatctctgctagcgaaccttcaagcttctttatttgtgtctcatccgccgctccgagaaaaattaacgtgatatgatagtcaagcgggtgcacccatttttgaaacgtcaataccggttcgtttttcgcagcctggtagatcggatttgcaattccctcaggtatgggaacgccgatgaaataatgaggccgtatatctggcatccgtctgacactcccttctttgacagctattattttatcaataaagaggctgtgcggatagaggaacagtgtatgaaaacactctcgcacaaacgtttattatgttaggatattatatgacacttgttttattcagaaaggaatgacaatgttgaaaatcgttgcaaacacagctgatctgataggagatacaccgctagtgagattgaatcggcttcagccggaaaatgcggcacaagtctatttaaagcttgaatttttcaatccgagcggcagtgtgaaagacagagccgcttatcaaatgatcatagaagctgaacaaaacggtttactcaagccgggatcagttattatagagccgacaagcggaaataccggcatcgggctcgccatgaatgcggcagcacgcggatataaagcaatcttagtgatgcctgatacgatgacgaaggaacggatcaacctgcttaaagcttacggcgcagaggttgtattaactcccggagaggaaagaatgccgggcagcatcaaaaaagcgaaggagcttgccgaacaaattccgaacagctatattccaatgcagttcgataacactgccaatcctgatgcgcaccggaaaacaacagcgcctgaaatcgcccgggcaatagaggaaatcggaaaaccgctcggcgcttttgtcgcctcctctggaacgggcggaaccattaccggaacaggtgaggcgctcaaagagctttttccggatatcacggttcatgttgttgagccagcgggttcgcctgtattatccggcggaaaacctggcgcgcataaacttgtaggaacgagcccaggctttataccgccgattttaaatgaggacgtttatgatgaaattatcaaaatctctgatgaagacgcgtatacgacgacaagacggcttgctgctgaagaaggaattcttgtcggtccttcatcaggcgctgcctgcttcgcggcaatcgaaacagcgaaacgcctctctcctgacaaagttgtggtctgcatgacagctgatacaggagaacggtacttatcaactgatttatggtcatttatttaaaaaaaggactggcttcagcagaagccggtccttttattttgcaagctcgtaaatggcctgagcatataacgctgtcgatctcagcaggtcatcaatttcgatatattcatccttttggtgtgcgctgtcagggcgtccggggaacagcgggccgaacgcgacaccggcttttaaggatctcgcatatgtccccccgccgattgagattaagtcagcttttttacccagctggccttcataaaccttttgcagggttttgactaacggatgatctgcggacacgtgatgcggcttgctgtctttgaattctcccagatcaaattcagatgcactttcgaatgcatcgcgaatcgctttgctttctgctgtcacaggatagcggatattgatcccgagctcgcctccttgcccttctttatagcgcagtgtgccgacatttaatgtcagctcaccgctgatttcatcctcacagtcgatgtccagtttttttcctcttgtatcacctgagaacttatctgtcacaacttgcacaaaccgctttcctgcatcgtcaagctcagtctgctggagaaattcgcacaataaaatgccggcattgatcccattgttcggttccatcgcatggcaggaaagaccgtacatacgcaaaatgagctgaccgttctctattgcagcttcccctttttggtccgtcgtgcggagcatgtctttaaatgaagacagaatctcttcttttttcggcccttcaatgacagcttccgcagcgtcgggcaccatgtttaagcgaaggcctgattgaaacgagacaagcactgcctttggttctgcttgatttgggcggtgcggtataagtaaagaagcatcgatgatccctttttccgcattaatgattggaaaatcggcgtcaggcgcaaagcccattgttggcatttcttcatgcttgaaataatgctctacgcatctccaatcactttcttcatctgttccgataatcattctgactcgcttggacaggggcaaattcatgtctttcacgattttcagcgcgtagaatgccgccattgtcgggcctttgtcatcaatggcgccccttgcataaatccgtccgttgcggatttcagctgaaaatggatcactcgtccatccatctcccggcggcacgacgtcaacatggcaaagtacgccgataatgtcatcgccctccccccattcaatatgacctgcgaagccgtcaagattttttgttgtaaagccttctttttctccaagctccagcaatgaagtcaggctggcatttaccccttctccaaacggtttaccgggtccggcggttgtttcgtccatgacactgttgattctcaaaaattcctgcgtatcacgaattaaatcctctttttttctgatcacttcaacttcccagttcataatgatcccctttccgcaagaaatgacttgcaaaaaccaaataaaacgaataatattaatggtgttttgttaaaacgttcgtaattggaggatactatgtttcatctaaaagagcagcaaacatccataaagcaagaaatcatagcagggctgacgacctttttcacaatggtctatatcgtcgtggtcaatccggtcattctggctaacgccggggttcctttcgaccaggtgttcaccgcaacgattattgcctccattgtcggaacgctgtggatggccctggcagcaaattatccgattgctattgcgcccggcatgggcttgaacgcttatttagcctttcatgtggtaagcgcaagcgatggcggcatcacgtacgcaacagctttcagcgcagtatttacagcaggggttctcttcattattctatcgttaacgcctttaagaaaacaacttatagaagcgattccaaacaatttaaaatacggaatcacaactgggatcgggctgtttattgcttttatcggtttgcgtcaagcgggcattgtggcagctgatgagtcaaacctggtcactctcggcaatctgcattcacctggtgttattttaacgctggtcggccttttgatcagcgtggtcctgatggtgctgaatgtaagcggcgctttatttatcggaatggcagctaccgctttgatcgcctttttcaccggtcagctccattttccaaagggatttatgtcgcttcctcatttgccggaaggattgatgatctcaaatccatttatcgcttttggcgatgtcattcatcacggcctgtacgctgtcgtcttttcttttctattagtcaccatttttgatacgacaggcacgatgatcggagttgccgagcaagccgggctgatgaaaaacaacaagctgccaaacgtgcgaaaagcgctgcttgctgattcaaccgcgacaacagtaggagctgttttcggcacaagtccaacgactgcatttatcgagtcttccgccggtgtcgcagctggaggaagaacggggcttacggctttgactgtcgcggtgatgtttgcggcttcaatgtttttcagtccgcttgtcagcgccttgtccggtatagccgccatcacctcgcctgctttgattatcgtcggcagcctgatgatgggttcagtttccaatatgaactggaaagagatggacgaggcatttccagcgtttctcgtcattctggccatgcctttgacatccagcatttctacaggaattgcgcttggctttatttcatatccgatcgtaaaagcggcgcggggaaaatggagagagattcatccgctcgtcatcgttttcgccattctgtttttcatccagctgtttattttataacatagaccaaaaaacccaaacgtcgccgtttgggttttttatgtaaacaataaagagacagcggccgctaaaaaacaacaggcggcaaacgcatagtgcaggatattgatacagctttttctggcccgataatattcatcactttccttatcggcgccaattaaaaaaggggcatccatgaccttgtcaaaaataagcgtcaggatataacggcaaacccctgtgtatactagcagcgcaatcaccttcagccaaattggggaaacaaatatgagaacagtgaaagctgacaatagcatgtacatctgcctcgcatactcgccattcctcagcatgactttaaaaaacaattccttatagcctgtgcagatcgttcgtcttttaaatatcctttttgaattacggtataataacggttttcttctcatcctgtcttttacttttggcattcccgcctcctgactcatcatcatcacaagtcctgcaagagcaagcctgctttttttctcttcagtcacctcagcttcaaaagccgtgaacgaagccgtctttttcaaactgcggataactgagaaaagcaaaaataaaatgccaaaaagcgcaagcaagtgccactgagtcaaaacaatcaggatagcagaaccagcaaaaaatatagctctgacaaaaatatcgccaatccatctcgaaatggagcgcggctttctgatcctgtcttgctttaaggataaaaagaatatatgaaggccaaacaaataagacaatagagcagtgctttctgcgaatgtgatgtgaacagaatgactgataaggggaaggacaataaaaaagagaagcagccatttagccagcgtgaccagaaaagaatacaaaagcgcgtaccgtttgagctgatagatgatttccttcttttgcagcaaaaacactttgtccgcttccattaaaaatgtacgaatcgagcctgtaaacatgatcagcccacacacagcgtacagccatctccactccgccacttcagaccactcataaagaaggcctcttccattcatcaaatcaatatactgatagatgacaaaagcaatcgccggcaaaacgatgtagagagcgactgtccagtcaatgaccgcatgcaacactttaaactgatacttgtaatagtcaaacagccttcgaaaaaagagcgtacgcccgttcatggccgatcaccttgaactgccttataaaaacagtcaagcaatgactgcccctctaatccggtcttgtcctgaatatcttttaacgtgccttggagaaataatgaacctttctcaatcatataaaaccggtcacagattttttccgcggtatcgagtacatgcgtgcacataagaattccggctccacgttctttttcagccttaagcatgtccacaaagcgtttcgtcgatatcggatcaaggccgataaacggttcatcaatcacatacatatccggcttagagagaaaggcctggataagcattagtttttgctgcatgcccttcgaaaaggtgacaggcagctcatgtttgacatgatcaagcgaaaacgtctgcagcaggctttgggcccgatgcgcaaattctctctcttcaatgccgtggagtgtgctgatcagatccaaatgctcccacagcgtcagttcttcgtaaaaggacggatgctccggaatatatgcaaatgaacagtcgttccaggcaatatgccctttaaaatcttctgaaaggccgagtatcgccttgattgcggtgctttttccggcgccgttagctccgatcagtccaaccagctccccttttctgacttccagaaaaacatcggtgagcactttttttcggcttgtatacccggcctgttctattgaagcttcaagcaaatttgtcaaaactcacccacctccaaaatttactacgaaacagaataaaaaaagtttctttaaccataataatattgagccgaaatacatagtaatccaacaaggatggctgcccaacgcgaattggaaaaaattaataggagttatccctagattcatcactgcaatatcgtgtataatgagggcgaattattttaacagttacagatgtctgcctttgttgctatttcgtacgcagttgatagtcgtgagttgtggttagtcaagtccatccgatcttatgatagggagtggttttttgaaaccttcaacaaaccgtatgctaactcgaatcaaatcagtttacatgtttatccaagaaaaaggtcttgtgacaacacaggaactggttgacgaattcggcattacacctagaacgattcaaagagacttaaatgtgttggcatataatgatcttgttcatagtccaagccgtggcaagtgggagacaacgagaaagaaagtaaagattacctcataaattgaaaaattacatagggccgcctgagagcggtccgatagataatagggcgaagaaactactgagccttgtttttgtgtgcttataaataaaaccccgcattcggtatgcggggtttttgtcatgcttgcggctcattgagcaaatgaagctcttcctctgtcagctcacggtattctccgggtgccagagcgggatctagggaaacgcgtcccatcgaaagccgcttcagataaaccacttcattgccgacagcctttgccatttgcttgacctgatggtattttccttctgtaattgtcaggtatatcacggtattgccactgtcgtttgttttgatttccgcttttgccagctttgttttatagccgccctctatgtagacacccgtttccaaatcggagatgtcttcccgagaaatctgtgattttaaatggacttcatacgtttttggaacatgctttttaggagaaaggagccgatgtgcgagctgcccgtcatttgtgagcagcaaaaagccctctgtatctttatcaagcctgccggctggaaatggctcaaatctcatctcctccggcgtcagcagatcgaccactgtttgctgccggctgtcctcagtcgccgacagcacgccctgcggtttattcatcataagataaatgaactctcgataatcaaccggttccccgtatacggtcacctcctgcgtatcaggatcaacgtgcgcctttacatctttggcaggtttgccgtcgatcatcacggctccagccttcacaacggctttgacttcttttctggaaccatacccgctgttggcaagcagcttatcaagtctcattcccaatctctcctttataaaagaaagcccgcagcatgcgagccctcagtttcatcatatctagttcatcagcctgcatgtctgcctttctttaagaaacctggcaaacggcggcctaaaattttctgtaaaaatcctaatcggtagccacaatacaggtagacagctccgccaacagcggccgcgatcaccacaacaatcgcagcttgcagctggccatcctgataggaaataaagaagcctaatacccactgcacgattttcacggcaatacccataatggctgataagacaagcatcaaaacagttcgtttaactagtatcttatacgaatagcctgcatggcgcttaatcatgataaacccatataaaagggaagcgatatatccaagcgccgtcgctaaaatcgctccgtcagcctgcatcagcttgatcagcggaacattcagcacaagcttgatcacgacgccgatcacaaggctgacaaccgcaaatttttgcttattgatgccctgcagaatggctgcgttgactgtaaacaaagagaacagaattgcgactggcgaataccatagcaaaatgtttgcccccagttcagggtgaaggctctctgacccgtaaaagaacgtatacgtcggtcctgacaatagagagatcccaacaacagccggaataattaaaaacaggatcgtctgcatcgtttgattaatctgctgatttaacagcttatagtttccgcttgtaaacgattcagtaatcgttggaattaatgtcagtccgaaagcagttgctagggaaaccgggatcatcacgagcttctgaacatacagggttagaatcgcaagcatgtcttggctgatggcttgatgaccggcttcaatcatcgctttgttaaacgtatttgtatcaatatagttatacaaagggatagctagtccaacaaaaacgtacggagcagcatagctgaacagctcgaaaaacattttcttgtagcttaggtttgctgtcggacccgtattcggcatcatcgccagcaggctgcccttccgtttgttccaataaatataaagcacgaccagccctccgaaggcaccgatcagcgctgcgaaggttgcatagccgacagcgatgacaaggccgccgttgaaaaccttcaaaatcaagaatgtcgcactcaatagaaagatgatgcggacaatctgttcaacgacttgggaaacagctgtcggacccatcatttggtgcccttgaaagaatccgcggacaaggctcataatcggtacgaccaatagcgctaagcttaccatgcggatgacataaacgacatgatcaattgtcaggccgttattatccttgcctcccagcgatatttccgcaaacatcggagccgatagatacagaatgaaaaaggctatcattcctgtgacgagcataaccgacatgcccgccttgagcattttcctgcttgtctcataatccccttttgaattatatttggaaacaaatttagaaacagcggccggaaagcccatcgtagcaatattcaaaaataaagtgtattggttgtatccgtattgaaataatgcaccgcctgtcgccccgaccataatgctgaagggaattaaatagaccatccccagaatccgcgatatatatgtaccgagcgttaatacaaacgtgcctcttaacagtttgcttgacatgtttcttcatcaccattttctacgaagattcaacttttctattttaccacaactgggcatttagacggtaataaatacaaaagcaatcctgtgaacattcatgtccgcggcaaaagacgtttaaggagcggctttctttcgctataatagtactgcggacggggtgtccgcacacgaaatgaaaagaaagttgatgataaagatgaaacaatatgacgtaattgtaatcggcggaggcccttcaggcttgatggctgcgattgcagcaggagaacagggcgctggcgtgttgctgatagataaaggaaataaattaggacggaaactcgcgatttccgggggcggccgctgtaatgtgacgaaccgccttcctgtggaagaaattatcaagcacatccccggcaacgggcgttttttatacagcgcgttttctgaatttaataatgaagacattatcaagttttttgaaaacctcggcattcaattgaaggaagaggatcacggccggatgttccctgtgaccgacaaagcccaaagtgtcgtagacgcgctgttaaacaggctgaagcagctccgcgtaacaatcagaacgaacgagaaaattaaatctgttttatatgaagatggacaggcagcagggattgtgacgaataatggcgaaatgatccatagccaggcagtcattatcgctgtcggcggtaaaagcgtgcctcataccggaagcacgggagacggctatgaatgggctgaagccgcgggccataccataacagagctgtttccgacagaggttcccgtcacttctggcgaaccgttcattaagcaaaaaacactccagggcttatcactaagagatgtagccgttagtgtgttaaataaaaaaggcaaaccgattatcacacataaaatggacatgctgtttacccatttcggcctctcaggacctgccattctcagatgcagccaatttgtcgtaaaagagctgaaaaaacagcctcaagtgccgatcagaatcgacttgtatccggatatcaatgaagaaacgcttttccaaaagatgtataaagaactgaaggaagcaccgaaaaaaaccattaaaaacgtgctgaagccttggatgcaggagcgctatctcctattcctgctcgaaaaaaacggcatctctccgaacgtatcgttttctgagctgccgaaggatcctttcagacaatttgtaagggactgcaagcagtttactgtcctcgcaaatggcacactgtcgcttgataaggcatttgtcacgggaggcggggtatctgtaaaagaaattgacccgaaaaaaatggcttctaaaaaaatggaggggctttatttttgcggtgaaattctggatatccacggctacacaggcggatacaacattacctccgcccttgtcacaggcaggcttgcagggctaaatgccgggcaatacgcccgttcttaatcattactctttaaatctcttgccgccaaactcacatttgaacattccccgcattcatgttagggtgagacttgttttgtttcacctgattgcggggtaattttaagagaggaatgagctgccatcgtacgaccatactaagcctgcgagcaagatataggcgtacacaaaaaattagagggtgagaaatgttgaaacatatatctagtgtattttggattgtgattgcaatcacagctgcagctgtattatggggtgttatttctcctgacagcctgcaaaatgtgtctcaatcggcacaagcatttattaccgattcatttggttggtattatcttttagttgtctctttgtttgtcgggttttgtctctttttgattttcagcccgatcggaaaaatcaaactcggaaagcctgatgaaaaaccggaattcgggttattatcatggtttgccatgctgttcagcgcaggcatgggaatcggcttagtattctacggtgcggctgaaccgatcagccattacgcaattagctctccatcaggtgaaacagaaaccccccaagccttcagagatgcactccgctatacgtttttccactggggtttgcacgcttgggccatttatgccattgtggcattatgcattgcctatttccaattccgcaaaggcgcacccgggttaatcagcagcacactgtcaccgattctcggggataaagtaaacggaccgatcggaaaggccattgactgtattgcagttttcgccactgttgtcggggtgtcaacaagtcttggtcttggcgcaacccaaattaacggcggtttgaattacctgttcggcattccgaatgcgtttatcgtccaattggttttaatcattattgtgacagtgctctttttactttctgcgtggagcggactcggaaaaggaattaagtatttaagcaacacaaacatggtattggccggattgttaatgttgtttatgctcgttgtcgggcctacagtgctgatcatgaactcatttacagattctatcggacaatacattcaaaatatcgttcaaatgagcttcagactgacaccgaacgatcctgaaaaacgcgaatggattaacagctggacgattttctattgggcatggtggatttcctggtctccatttgtcggcattttcatcgcccgtgtatccagaggccggacgatccgagaatttttaattggcgtcttggtgacaccttgtattttgacatttctatggttctccattttcggcgtatcagccatggatctccagcaaaaaggcacgttcaatgtagcaaagctgtccactgaaacgatgctgttcggaacacttgatcactatccgctgacaatggtgacatcgatccttgcattgattctgatcgcagtattctttatcacgtctgctgattcagctacattcgtgctgggcatgcagacgtcgtacggttctttaaatccggcgaattctgtgaaactcagctggggtatcattcagtccgccatggcggctgtgctcctatattccggagggcttgccgctttgcagaacacagcgattctggcagcgctgccgttttctatcgttatcctgctgatgattgcctctctctatcaatcgctctcaaaagaaagaagagagatcaaaaaagcggagaaactcgataaaccgagaagtcctagagtgaaaaaagcatattaacaaaaaagatctttccgcgcctgcggaaagatctttttatttgcgatataaaataagggcggaaaaacagtaaagctgctcgccgtctgggtcgcacgcggccgaaaccgtatatttgatatcaatcagctgctcctccgatatcccttttaaaaatgaattgatttccgtctgtaagtctttttcatgctcttcatcaaataccgctaccttcagcattttatccgctctcctttctctatcaatctattccgtttggaacagcgttatgatagagaaatgatgattatctcgtttccggataaaaagctttccgtatatgggattccctctgtggctcgccgccttgctgctccactttcagcagcacggcataaacaatgcgcatatgacagtagctgataaggctgacgctgaaaaaagggacaatgcccggcaggtacgcaagcaagaaaaaaagagcaacagtcagcgcaagcatagcaagcgtatattgcaaatacgccacactgagcaagagcgaaaatttcacatacagacgttttttccagtcaaaatggacaagcagcggaaacacataaaaaagcatggatacgaacaaaaagccaaatatcataatggcgaagcgcaggatgtgcagaaggaaatgacttggataaatgaaggccaaatcaatataaatgatcactccgatgagcgccagtacagcgccgagcagatttgaacgaaaaaattcacccttatattcctgccaaaacgttttgagcacgggaacgttgtcctgcccctgaatccacttccgcatgacagcgaataaagccgcggtcgcgggcatgatgccaaacacaccgagaccgagcaacgtaaaaaacagccacagcaagtttgtatacgcaaatctcatgatccattcgcaaaaacgcagcatccgtcccagtgagccatcatgttccatggcgccccctcctttttttgcattatacattctgcatctgaaaaagctctttcatgccgatcggcttcttttcggcaaccgagcgccacattccctcaccaaccgcgatggagtaggctccagcttcagccccggctaaaatatcatagcggcgcagcgggtcttttcctaaaaaaagatcctcaagcaaaagcggatcacctccgccatgccccccttcatttttgaccacttgtatcgtctgctttgattcaaaaagcggatagtattcgattgtctgctcaggaaaagcaaacggaattctggaaggttcgtgaaattcatttgattcaatacgcccttttgtgccgttgatcgtcagccggtagccttcatacggtgccgaaaaaataatcgagtagcttaacagtgcgccgccatcatatttgactgccgccacgtacgtatcctcgatgtcaatttcctcgtcaaaaatacacgcgtcaggcctgtatgcagtatataagctagactggtctcctgcttcgagatgatcatcttttatagaagctttagaggaacggggatgccaccttgaatagtagtggcatttttctttaacacggcacgtcccgcaaaaacgcccgtcttcttccggcaaggggttccactcactgtccggcccatagtaattcaaggcgccataagcaaatacctcttccggattttgcccgagccaccaattgacgagatcaaagtgatgtgttgatttatggacagaaaggcccccggaaaactgtctcgacctgttccagcgtttaaaatagctggcgccatgatacgtatcaatataccaatttaaatcaacggaggtgaccctgcctatttttccgtccagaatcatttcttttattttccgatgaaacgggctgtagcgatagttaaacgcgacggtgacttttccttcgcttttggcctccgcttcaagcacccgattcgcatcctgcactgttgtcaccattggtttttcagtaattacatctgtatcccactgaaggctttttacaatatatgtgacatgcgtatcgtccctgcctgccacaatgacgatatcaggctttgagacgcgcatcatctcgtcaaaagcatcttcgctaaactcaggcacgtgggccagctcgggaaatttctttttgcaaacggcaaaacgtttcggatcggcatccagcaatcccgtaatctcataatgagttgaaaaccgctccaacagcggtttgataaacatactgaatgctctgctgctcaatccgcaaaagacgatgttcttcaatatcctcacctctatcgggcttcagttagttgagaaatcagctgcagcgcttcctctgttttttcagcatacacagggataaacgccgccatatcgcgattcaatcgaaaagaatagccgttcagctgttttttccctttttcgatctgaacggcatagatcgttttttctcctgttttattattaacagttgtataaggagatgttttttcaggaggcaatccgtttaacggctgaaaattttccggatcattgtaagcttgaaacatgtcttcaggcacgatgaaaacatctccctcatgggcggtaatttcagtcagcagtttttcctgaaaagctggaaagatatcgaccttcccagcattctgctcggcggccttttttattttttcctgtacgccagcctgcatatcagaaaagagaatgacatgcattccgtccgtcctgcttgagcatgatgccaaaaagagcactgagacgatcacacacaaagccgtacgtatcctttttgtcatttccccgctgacctaaaaagaggctccagctctgtcatagctaaaataaacgcgccggctccgtgcagatcgtttttgcttctttcgcggctgacataatagtcatagaaaccggctgacgttccgacacatatgtctttgacgagaaacgcgccgtcttctgatgtttcggttttatgctgaatcaagccttgatacgcttttagcagtgttgtttcgtaagctctgtctaaatagcctttattgattcccttcgcaaatgcgtacatgtacaggcaggatcctgagctttccagccagttatcagacctgtctcccttatcaacgatctgataccataaccccgtctctttgtcttgatagcggcagatgctttccatcatgtcctgcagcgtgtttttccacccatgacggtttggatgcttcttcggcagctcttcaatcatgtcagcaagagacatgacgtaccagccgatggaacgtgcccaaaattccggtgaacagcctgtctcttcattggcccaaggcatttttttcgcttcatcccaggcgtgataaaagagtccgttttttgcatccttcgtatgctttctcatcaatgactcctgcagcacgacctgatcaaacagctccggctcctgcttcagattggcatatttcagtgcgaacggccccccatgtataagccgtcaagccacatttggtatggataaccgtctttgtgccaaaaaccgccctcagacgtccggttcagtgttccatataaaccgcgcagcctttttgccgctttggcataccgttcatccttcgtctgctcgtataatggaaaaagaatgagacccgcttgaatggcgtccagttcatctcttctaaataatagattgccataatcatcgattaagagatctgcataggccttcgcatactcaaaataccgcttttccccggttgcttcccacagccgcaatacaccgcataagaaaacaccctggtggtagtgccagcggtttgcaggaggcagctcctggactgtgtacgtattcataatggtttttgccaatgcctccgcgtacgtaagaggcgattttacagcgattgattgatccattgatcccatccctttcttaataaattccttcctcgccaaatttcttcgctaaacgattcgcaagcatgaccaaaatcagcccgaccgccgctttaaatacgccgactgctgtactgtagctgaattgtccctgtttcagccctgcagtataaacgtacgtatcaaaaatttccgccacttccctgtttgtcgcatttaacagcaaatacacatgctcgaagccaagctccagcgtgtctccgattttcaaaatcagcaaaacgacgataacgcttttaatggcgggcagcgtaatatgccacatttgccgcagccgtcccgctccgtccattttcgccgcttcatacagctgggggtcaaccgctgtaatggccgccagataaatgatcgtcgaccagcccgcttccctccagataacctgaagaatatacaggggccggaaccattcttcgttcagcagaaaattgattttttcaccgccaaaaaacacaatcagttcattaatcaagcctccgtctaccgttaaaagcacaaacgaaagcgatacaacaatgacccaagacataaaatgcgggatataaatcagcgtctgaacaaattttttaaagagagcaatccgcacttcgttcaatagaagcgccagcagtatcggcaccgggaaaaatatggccaggttcaaagcaaataacacgagcgtgttttttaacaagagaaaaaatgtaggctcagtaaacagcctgataaaatgcttcagccccacccactcactgcccaaaatgccgaggaacggctgataatcctgaaacgcaatcacaattccccacatcgggacatacttaaaaagcaaaaaataaatacaccccggcaaaatcatcaagtacaaatatttttgctgaatcagcttgattagtaagcgctttcttttttcttttttaaaaatgactgtatcaacagccggcgcttgcgcttctgctgttttcattttttcccatcctcctttcacgggttcttgcattcactgtagcgcagaggtaaaagtccgtctacaatcatatgatcacatcctgttttatccctttataatcaaaggttcaggaggtccacctgaaaaaaagacaccgatattagaaaatgattattgacaatatctatcaatctttggattaattgtattaaggtgaagtggatgttatgaaatggggggttttatgaaaagaagccaatacaagttttactacaaactgattacgtttttctgcctgctcagcaccattccggttattttggtcggattgttttcgtacgagcactctcagaaaacggctatatccaacgtttcagaggaaaaattcgacacactccagcagacccagcaaagcatcgagcatatattgaaaaccgtcgatcactctttaacccactatgtgagttcgccgcctctccttcgcacattgtccgagcctttgcactcagaccaatttcaaatctataaccaagtgaaccaagagctcaattatctgcaaagctttgataccgatctgtccaacatgacgttagtcagttatacgaaaaaatggtacatgaacaattccggtttgtaccgtttgaatacagacactcttcatgaagcagcctcagcgtacacgaaacaaaaagcgagccgctcctattggacgcttgaggaaaacaatcatttgatttcaaccaaagaaggcacagcagaaaactgccgctacaatatcaatttaattaagcagcttcctttgaacagcacaaatacaaagggattggccgccgcaagcatcccgagctgttcgcttgtcaaaaatatgcccggctattcaaacgccaacaacctgtttatcatcgatgaaaaaggcctcatcatccttcataacaatatgtctgacgttggtgaatctcttcataacgacggctttgtccaaaaagtgctggcgcaaacggccaatagcggacagtttgaaacagttattgaccggattcattataaagtcacctatcaaaaatctgactataatgcatggacttatttttctctcgtttccctgcctgagttaaaaaaagaagccaaatcaatcggctggatcacttttgcagtatgcctcattttgttaacgctttcattgctgttctcttggcttggctcccgccatttttacaagccgatcagggtgctttacgaatcattcgcaaggcatggtgccatacaagaaaaacagccgcctcaaaatgaatttgagttaattgaacagagctttaagcagctgaaggacagaaatgatgatcttgaagaaacgatgaagcagcaagccacccacctgcagcaatattttatggtcaggcttatgctcggaaaactgacggatgaggaggttaataaccgttttgaaagcctcggtttaaagcaaaattggcggcaccttgccctgcttgtgctccaaattgacacactgaatcatacgccttatgagaaaaaagatatggatctgcttttgtttgccgtcaacagcctgattgagcgcaacatcccgacggacaaacatcttgcccccgccgtagttgacaaacagcaggcgacgattttgatcaatcaaagcgggacaaaggaagaattcatggctgagctgaatgagactgcaaggatgattcaggaaaaagcggaagctgagctgcagctgtctgtcagcatcggcatcagccagccgtttgatgtgctgacaaaagcgaaaacagcctatgcggaaggctcagaagcgttgaaatatcggctgaaagcggaaaacaagtcgatcatcttttacgaagaccttgaccagaaaaaaaccttcaaaacccattttccaaagcagcttcagcatgagctgttcgatgctgtcaaagcaggagacaaggagaaagcggataaatgcctgcacgcgattttacaagccattttcacccagaacaccaacccgtatcaatttcaaatcgccatcgcccgttttttgaaccatgtgattgagctgatgcatgtgcttgggatcgaattgtttgagcttgaagaaaacaaaatgctgtatgaccaaatttttgagctgaaaacgttcgaggataccgaaaactggctaaagaatgagtttattgatccgatgacagacaaagtgaacgcccgcgcggatgcccagtacaaaaatatttccgacaacatcattcatatcatccatcatgagtttgaatccgaattgacactggacgaaatcgcacgcaggctgcattacaacccaaattatttaagcagtattttcaaaaaagaaatgggaatttcattcagcgagtatgtctcaagctaccgacaccatatggcgaaaagctggcttgccgaaaccgacatggcggtcaaggacattgccgaaaagctgaaatataaaaactcgcaaaacttcatcagatcatttaagaagctggaagggattacaccgggaaactaccgccagcaaaaaagaagcatgtaaaaaacccaaaaccgcttgcgcgttttgggtttttccaatgttattttgcttgtttaaacgcttcttcgtattcctgaataatttgttttcctccgcttgactcccatttttccacttctttatcgaactggctttctgtgatgtctccaatcatatatttgtaggtcgcgtcatcaatgattttcttcagttcgtcaccccgttccgactccgatgcggaatacaggctttcagccgggtttgagacgataatcttttcattgtcctcggtcagctcctcgtacgccgtccgaagcggatctccagtgttttttaagtaggctttatcaatggcaattaaagcggacagcggctgaatatcagtctgccagtcttttacctggctttctttgcgtgtaaacgttttgtcctcacctttgttgtaatgaacgccgtcaatgccataagtcatcaggctatagacatcttcttcggcaattcggtcaaaaaacgccaagatccgtttaagctcagcttccgttttcacactcgttttcgggaaagcaaacacgccgttatggcctcctgatgcccatacccgctctttcccatctgggccttttatgcggttgatgatctcgagcttcatcgatttatcagaggcatggtcgcgcagattgaccgcatctaccatattgccaatataaattccggcttttccttgagaaaacagctcctgctgctgggttttgcttgtgacgggaaaatccttattcatatacccgttatcacgcagctttttcatatagttcatcgtgtctttgtattcctgtgtcatgaaatcaggcgtgaatttgccgcccgattccttccaatctgtcggcatgccttcatacgagccaatcgttttaaacgcgccgtaaatcaagtcattacggtctgccagcccgatcgtatcatctttcccatccttgtccgggtcgtcctccgtaaatgctttggccacttcataaagctcatccaacgttttcggggttttcaaatttaaattgtccagccagtccttccgaatgacgatcccctgtctggaaagcgggcgctctctgtatatcccgtagagctttccgtcaattgtcacatttttattaatgagtttgttcattttgtttaagttgggataatccttgatataatcgccgatttcccaaaacattcctgaccgaaaggcattcatgactgacgaatttttaatatcctggatggtcacgatttgcggaagattcccggctgcaagcgctgcattcagcctgtcttctttcaccgcgtctggaacccaggtgatgtcgagttctgtatttgtcagcttttcaatttctttaatcgccctgtccttcggcggctgctgatgatacaaaatcgccatccaagacagctttatctttgaatctgggccagctttgccttcagccgaagactgatcagttcctttacagcccgccagcactccgccgagtgccagtacaagcacaatcaaaagcaccctccatttgtttcccatcgtacccctccgtttcatatttctttatcctttgacagatcccagcaaagctccttttgcaaaatgcttttgtataaacggatagacaagcagaaccgggatggtcgccaccactatgaccgccattttaatggtttgctcaggcggcgggctgcccgaccccatttcagacatatccccctgcataccgcttgatacaatgacgatttggcgcagaagaacctgaattggccattttgctgaatcatttaagtacaagatcgctgtcatatacgtgttccaatacgtgaccgcataaaatagtgaaatcgttgcgatcgcaggaagagacagcggcagcacaattttaaagaatatgcccagatcattgcacccgtcaattttcgcggactcttccaggcttgatgggatattttgaaagaagtttttcagaatgatcaggttaaaggcattaatggctgtcggcaaaataagcgcccagtaagaatcgagcaatccaagcgatttgaccacaaggaaagtcggaatcatgccgccgctaaacagcatcgtaaatacgacgagaaacatgagcggctgccggccgattaaatcatggcgggataacccgtaagccatcagtgaagaaagaaacatgctgaccgcagtgcctatcactgtcacaaacacagaaacaagcaaactcttataaataatatctgttgaaaaaatgtagcgataagcatctagcgaaaaagtggtcggtattaaaataaattttttcgacacgacttcttctactgtggcgaaggatgctgcgatgacatgaatgaacggaagtacgcatattaaagcgaacatcagcaagaaaccataaatcaacatatcaaacagacggtttttcagtgaatgtgcgatagctcccacctctctttgtaagcgttatcatatttcggaaaccgagctcagcatgtgacgatatcgtgtctaaaatgtagcaaatctgtgattgccatgtctataatcatttgaacagtgtccccggccgggcgggggctgccgcgaattgagaccgataacaaaagaaaaagagcataatcttagaaaatgattatgctccgttctcctcctcgttcagaagttcagccgtattgatttgtggcgaaaacccaagttcattcacggcagattcaatggaccatggccggcccggattatcagagacggcgtaataagtgccgtaccggatattggtctcaatagcggctttgaaaatcgacagcagatcggggtgagaaagcagtgtctttttcgtccgttctttttcatgcagcgtatccatttcatctgtgacgactgttccgattcgcaggttgattactgatagcttattttccaaataaaacaaatggccgatctgttcagaggtcagctttaatacaccgtacaagttttttgacagcggataatcgcttgttgtgatttcccgtcctaagagcgagcgcccgtctttttcgtagacatctgtgacatgattactgctggcgaacacgagcttttgaatgccgagctccgctgccgcacggcacagataatagcttgccctatagaaaacatccgtcattttttcaaactcagcgatgtccataatatcgtatttgattttcacagcgagtaaattcaagatgacatccgtatcttttggaatcttcttcaacagctcctcataatttgccgcgtcagcctgaatggaagaggctttgccatcgaaatgatctttatcaagcacagtcacttcatagtctgaaataagcccttcagcaagcagtctcccaatcacaccatttccgccggcgatcagcacttttttcactatgttcactccccttttttatagattgcccattttcggcggggctgacacttttttggcactcacattcttaggcttattcaaaagtcaccggcagctcctcaagcgcccgaaatccaaaaagcggccgataccgccattcaaaatccgcgagattaaggctgggcattcgctgcagaagagtgttaatcgcaatttgcgcttctaatcgtgccagcgaggaccctaagcaaacatgatggccatgcccgaatgaaagatgcggattaggacttctcgtaatatcgaagacatcggggttcgtgaatatgctagggtctcgattagccgcccctaacaaaagatagacttgttctccttgacggatcgtcaccccgctgatgtcaatatcctctgacgcaactctggctgtcatttgcgtggggctttcatagcgtaaacattcctcgactgcggtatcaataagatctggattttctctcagtttcaaaagctgttctggatgctgcagcagacaaaggactgaattgctgatgagattgaccgttgtctcatgtccggcgatcgccagcaatatgcacgtagatgccgcttcctcttccgtcagcttatccttttctttccccttcaagagcatgctgatcatatcctgttgagggtggcgttttctcttttgaatcagctctttgaaatatgccatagcctgcacagccataatattgccctctgttaatgcctttcttgagcgggtaaaatcaatcgtttgaatgagactcgcagcccactcctttaattgctccctatcttcctccggtacacctataatgttagctatgacaaaacttgctaaaggaaaagcaaagtccgaaatgacctccatcttttttttaccttgcacttgatcaagcaaatgatggacagtttcaatgatatacggctgataactctctgtcgttctcggcgtaaacgctccgctggcaagcgtccgcaatcgtctatgatcaggccggttctgaaacagcatcatttgattttgcacatgtgaaaggtcctgatatttggttgagctctcaggcagcggggtgcggactttgaatctcgcatctttcaaaatagcagccgtttcttcatatcctgtgacataccagcccgggtattttaagaaactccctttatagataggatgaacagctcgcaatgtgtcgtaaaaagaatatgggtttttcaaaaactcagaagatgcagttgacgatgcaattgtcacgtgattttctcctttctgttcaaaaataaaagcaatcgacatcataccgattgcttttattgattctttcagcttttcgcacttaaactggccttcatttcttcgactgattcaacttcaaagcctaaatcactcagcattttatgatcctccgtctcctcttgcccggcagttgttaagtagtctccgacaaaaatggagtttgcggcgtaaagccctaatggctgcaatgagcggagattgacctctcttcctccggaaatgcgaatttcttttgatggattgataaaacggaacagcgccagcacttttaaacaatacagcgggtttaattcgttgacgccttctaacggcgtgccatcaattgcatgcaaaaaattcaccggaatggaatccgcgtcaagagccttcaagcttttggcgatgtcaatgacatcctgtttcgtctccttcatcccgataatggcgcctgaacacggagacagccccgattcttttgcgatttcaaccgtattgactctgtcatcgtatgtatgtgaggtcgtgatgtttgaatggtttctctgtgacgtattcaaattatgattatagcggtctactccggcatctttgagacgcttcgcctgctctggcttcaacagtccgagacacgcacaaaccttcagtccatacgtctctttaatttcctgaaccgcatctacgacctgatccacttctctgttagacggccctctgccgcttgccacgatacaatatgtgccgatattcagatcgtgcgcccgcttcgcgccttcaagcagcgtttccttattcaccatccggtaagactcaatcggcgctttcgaaatcgcagactgtgaacaatagccgcagttttccgggcagagcccggatttcgcattcataatcatattgagctttactttttttccataaaagtgttttctgatatgaaaagctccatgcattaatagcaaaatatcttcatcaggacaatgtaatattgaaagcgcctcttcgtcagtcacttctgctccagccagcacccggtctgcgagttccatccattgattcattctcatacccccacttgattcatcagtaatgatagattgatatggtcttttaccatatgtagaaccgtttctttcgtcacgttggcaagctttggcgtaacccctaaaatcggcacaccgcataagcgctcaatcatctcaggattggttttttcatcttcatcaggagagtcactgattccattgatgataattccggcaattggaagccccatgctttctgcatatttgacagttaaaaaggtatgattaatggttccaaggtgaggacgtgccacaataatcatgggaagctgcaacgcttttatgacatgactgaccaaatagtcctctcccaatggcacagaaataccgcctgcaccttctacgatgaagcattcatgtttttctctaatccgcccccaatggcttaaaacctcttccatggtgacagtctttccctcaagtttccctgcaacgtatggtgcaagcggcgctttgaaggcaaaaggcgtaatgtcttcatgagaaagactggtctgcgacatgtctttcagcaaacttgtatcactatctggatgatgacgcgatatcccgcttaaaaatggtttatacacaccgacatctctattatgttctttcaataaggcagcaagaccgctggatataaccgttttccccacttctgtatcagttcccgtcacaaaaaaacccctcaaatgatatgcagctcctttccgattgaatgaaatgttttcagcaaatcatcaatatcacccatactgtggtcagacgtgattgtaattcgaatacggctttcacccggtgcaacggtcggcggccgaatggcaggagcataaattcccttgccctgcagtttttcagcaaataggaccgttttatgggcatcgccaatgactacaggaataatcggtgtgtgatctcctttcaccacataacccatattcttcagactggttctgatcgtactgatataagaaaataaaagctgtcgtttttccctgctggcttcaatgatgttgaaagcctcatgagcagccgcacagctggctggcggaatagcggtttgaaagataaatgttctggcatggttcagcaaaaagtcgatgaagaccgctgatcctgccgcaaaacctccttccgcgccaacagctttgcttaaggtgccgatcacaatgtcgggacaaacaccaaagtattcactcgttcctcctcccgaatcgcccaaaactcctgttgcgtgggcatcatcaacgaccacgaaggcatgatagcgtttcgcaagtgagatgatctgatcaagaggggcgattgtgccatccatgctgaataccccgtctgttacgataaaacggcgctgataacgctgtgtttcattcagcttgttttcaagatcattcatatcaatatgccgataaacaactgtatcagccttagaaagtcggcagccgtcgataatacttgcatgattgagctcgtcacttaaaatgacatcttccttttctggcaaggatgaaaggagaccgacattggccaagtaaccgctcgaaaacagcagggccgcttctgtccgtttaaagctggcaatcttcttttctaacttttcatgccagaccgaattgcctgtcgttaaacgtgaaccgctgcttcctgtcccaaattgctgcaatgctgtttgggctgcatcgatcaaacgtctatcgcttgcgagccctaaataattgtttgaggaccagaccgtttgattttcgccatcaatgttccgctctggaaccggcgctccatccattgaccgcaggttacggtgtacgccggcttcctttactatgtctaaccgctcgtttaaccaggaatcaatcttcaaggctcgtaacctcgtggatcgcttgtttcataatggcaaccatttccgagagctcttcagctgtgctggcaagaggaggaagaaatgcaatcacgtccccaagcggccttgtcagcattcctaactctctcatttttaaggaaactttgtatccaatccgccgatcagccgggtaaggttctttggtttcctttgatcgtacaagctctgcaccgcacataaagccaagctgccgaatatccccaacataaggaagagcgtgcagatcttgaagaagaaaatggagctttttactttttttcgctacttgttccacaatgttttcagattcaaataatgccagattttcaagcgcaactgcacagccaagctgattgcctgtataggaatggccatggaaaaaggtttttaggttttcataatcatcatagaatgccttatagatgtcttcagtggcaaacgtaacggcaattggcaaatagcctcctgtaatgcctttaccggcagccatcagatcaggctggacattctcgtgctcgcacgcaaacatttttcctgtacggccaaagcctgtagcgacttcatcaacgatcattaagacatcgtatgttgtacatagctcgcgcacgcctgccaaatatccttccggcatcacgatcataccggaagccccttgtaccattgattcaatggaaagcgcggcaatttcctcgtgatgttccttaagcagctgttcaagctctcggaggcactgatcacggcactcatcaggatcaccgctttcagagcgatacacataaggaatcggggccttgtaactctcgaacatcaacgggccgtatacgtggtgaaaaagctcaattgaaccgacactgacggcgccaatcgtatcaccgtgatacccgtttttcattgcgataaatttttgtttctcgggcttcccgatgttcttccaatactgaaacgccatttttagggctatttccatcgcttctgcaccgctgtctgaataaaagacccgcgtgagcttttttgggctgatatcgattaatgtttcggcaagctgggttgctggaacgttggtcatgcccaataacgtggagtgcgcaatttttccgagctgtttttttatggcattatctagttcttttttgcggtgtccgtggacattaagccaaactgatgaaaaaccgtcatagtattccttgccatttatgtctttgactttgattccagtcccgctttcgatgattaaggggttttcatcataatctttcatttgggtaaatggcagccagaggtgctttttacttttttctatcaaatcatgagtcatgatcttcctcccactctattaaaataggctgcttctccagatcatgtatgtacgtgtttacatcattggatccatcaataaaaaagactcggcagccctcttcagtcccgtattctttcattgctgtaatacgctgatagcccattttcttacccgcaacatagcctgttatgtaatccggatcgtccgaccagcataattctgcaacggctgccgggtgccggcttacctttgaagcgagcgcaagggcctcttttattcttgaatgagccggcacgtgactgtgaagcgcccatttttcaaaattagcgtccggccaatccattctggagacccgcacccctttttcttttgtttgatccattcgctttcctgtatgaatatcaaacaacaccgcacccctgatatctgaccattcagggatttgttcatatgctttttcaatcacgtctcgtgaaacgccttctttttccaataacaatcgggccagcttttgcccttcttccgggcagctcacttcattcgtatgcacaggcaatggctgaatggtttttatcgattcatatacctcttcaaattgaatttgcataaaatcaggttttcctcttgaatgggataaccctttttctaataaagcattgactgtatgcttcatctcatggaaaggtataagccgttctccgccggatatatgctttccgccgtcttcatgagatccattcatagaagccctcattctgacactataaaaagtttcttcttgcatcatttctcgccctttcactgataactgaagaacgtgtagtgcttctcaccttaattgttaaccaattatattttaaggttaacaattagaatatattattctctcctgtttctgtcaatagaagaaagcatcgatttatggcagttggttaaaaggaaacaaaaagaccgttttcacataaaacggtctttttcgatttcttttaacagtcacagccacttttgcaaaaaccggacagcttcatgcctcataactgctgtttcgaaatgtcccgaagcagaacggaccactcggtagcaatcagaagctccctgtccagcatagacagctgtcaattctttttcgattttgtccacgccctcggccggcgttaaccgatcgtgtacaccaacaagactaaggtgcgggcgcggcgcgatcaggccttggatctccgatgcggaaaaatgctttgcaagcgatgggacgtaataataaaagccgtgcctgtcaagattctgtgttttgatcagcacgtgatgatccacctggctgcacaaatccacacacaccttaatccggtcatcgagcgccgctgtccaccacgccatcaaacctcccatagacatgccgatggttccgatcctgtcaggctgaacatcagagcgtaactgcatatagtccaacgcacttaaactgtcataaatcatcatcccccacatcacttttccggtgagaagcatttctttaaatatctcgctttccgcttttccccgccgatctccaaatccccaatgatcaatcgcaagaacgccgtatccgagtgaagtaagctcatcagaaaaagaaggcgttttcaaataatccgctccctcaatcagctcactttttcccctatcatactggcccccatgcgaatgctgaaacaatacggctgggcacggtccttctgttttcttcggcttcacaaaataagcgggcaccttttcatgtccatttaaatcgagcaggagcgtttcaacgatattttcttctctttcttcaatacgtaatgtctcaacactgattggcctccgatcaggcaaatcaccaagcaatcgaaacagttgctttcttctttcggctctcatcccatcacccttccttattcgcttacttcacatttacgagacagatctgggttcccctttatttttccaacataaatcacatcatttactaaatatttagtaaatattatgaaatatttcgaaaacaattattgtaaccgcttacttttatatgatagtatcaatttatcaaaaacagatgagttaatattttactaaatagatgagagggatacccatggttcgtattaaagatatcgccttgaaagctaaagtttccagcgcaactgtgtccagaattttaaatgaagatgagtcgctttctgttgcgggcgaaacgagacaaagagtcatcaacatcgctgaagagcttggttatcaaaccgttgccaaacgccgaaaagcccgcgggcaaaaacagcgggctcagccgctgatcggtgtgctgagctgtctgtcccctgatcaggaaaggcaggacccttatttttcttccattcggaaagggattgaaaaggaatgctttgaacaggaaattttcattacaaattcgattcatctcggctcctttcaggaacatatctttcgggaattggatggtgtcattgtcatcggccgtgttcatgatgaagcggttaagcatatcagcgggaggctggagcatgccgtatttatcaatcattcaccagatccgcaagcatacgattcgattggaatcgattttgaatcggcttcacgccaggcgattgatcaccttttcgacttaggctacaaacggttaggctacattggcggacaagaaaaagagcatacgctgaaggacggccaaagcattcgcagaacgattgaagataaacgcctgaccgcttttttggagtcagccgccccccagcctgagcatgtgctgatcggagaatacagcatgcgtgagggctatcgcctgatgaagaaagcaatcgatcaaggccatctgccggaagcattctttattgccagtgattctatggcgatcggcgcattaaaagcgctgcaggaagccggactgcaagtgccgcgggatactgcaatcgtcagctttaacggcattgaggaagctgaatttgccagcacgcctttaacaacggtgaaggtatacacagaggaaatgggccggacaggcgtaaaactgctgcttgaccgtctcaatggccgaacacttcctcaccatgtcaccctgcccacaacattaattgtaagacaaagctgcggatgtacagcaaaggaggtgacataagcaaagattcatcacgatgataaggaggaaaagatgaaacacacttttgttttatttctctcttttattctgcttgttctgcccgggtgttcagcagagaaaagctcagcagataccgcaaaaaagacgttaaccatttattctacaatgtcaaccgacagtgaaagagatacgttcagaaaactagcggcagcattcgaaaaggaaaacagtgacattcatgtcagccttcatttcccaggcaatgactatgaaaatatgatgcgtgtcagaatggcggccaatgatttgccagatctattcgatacacatggctgggggaaaatcaggtacggagaatatacagcggatctccgggatatgaaatggactcaagatcttgatccaaatttaaacagcatcctcaaaaataaaagcggaaaggtgtatgcctatccaatcaatcaggcaaaagacggtctggcgtataatcgcaatattttagaccgttacggcattgctccgccggaaaccatggatgactttatcaaagcactgagaacgattaaagaaaagagcaagggaagcattgttcccttctggtttgccggatatgacaaaagctcattcgcccaatattacgaccaattcgctacacctcttctcatcacagaccctgcccataatgaaaaaaaacagctcaccaatggcactttcaaatggaataaatttacttacttatcgaaaatcctcaaacaaatgcagaaagaaaaattgattaacatcgacgccgtcacggcaaaaaaatcacagctcattgaattaatggcccaaaacaaaatcgcctttacaatgcaaggcggcacactcggccaagacgttgcccagatcaatccgaacgtcaaggtcggcattatcccgacacctgccatccatcccggtgatgacccgatatggatcggcggtgaacgctacacccttgcagcatggaaagattcgcctcaattaaaagaggcaaaagattttatcgcatttatggcccgcccggccaatgccaaacaaatggctgaagccacatcgcttccttcagggctgaccaatgtgaaagctgatattttctacgcaaacgattatgagcattatcaagatgtcaaagtcgagccttacttcgaccgtttatacttgccaaacggaatgtgggatgtcctaggcacggttgggcaggagctcgcggctgacattttggcgcctcaagacatttcgcagaagctgggaagagaatataaacgactccgggagcaatcggaaatacagggagctgaaaacaatgagtgagatcgcaagggacgttcatgtgaaacaggttaagccaaaaaagcagtcctcactttggtggatgtacattcctgctttgctctccgttctggtctttatgatttatccgtttgtgaaaggcacattgattacctttacaaactggaacggcttttcacaagtttaccaatgggttggattcgcgcaatatgaaaggctgttttctgatcctgacacttggcatatcttaaaaaacacgctgctttacgggcttggcagcactttttttcaaaatgtggtcgggcttctatacgctctgctcttaaatcaaagcattaaaacgaaagcggtaacaagaacaattgtgtatttgccggtgatgatcagcccgctcattatgggctacatatggtactttttcttctcctatgacggaggcgcgctcaacgatttgctcggggtcttcggcatcagccctattaatgcgctcgccagtccctcgctcaatccatggatcattgtcatgattaacacctatcaatatgtcgggattgctatggttgtctacttagccggtctgcaaagcattccgaaagactactatgaagcggcgcgaatggatggcgcgaaacaaggccagcagttttttaccatcacgctgccgctgttaatgccctccattaccattaatatggtcatcaatattatcggaggcttaaagctgtttgacgtcatcattgcactcaccgcgggcggtcccggaaatgcgtcacaatccatgtccacgtttatgtatgatttgtatttcaaacggcaggatgccggctatgccgcaacgcaaggcatatttatggcatttgtcattttgatcatcagcttttgcgcgcttgcgtactttaaaagaaaggagacggaaatgtcatgagagccgtccgtacaaaaaacatgcggatcattacgcttcttgccgccattgtggcctgtgcgcattttattcctttttatatcctgctgaccacttcattgaaagcaaaaggagactacagttcgaaatggatatttccagccaacatctcctttcacaatttctcagaggcgtgggagcgcgcttcgctaggtaactcttttataaacaccatgatcatcacaggtttttctgccttgttattaattatattcggctcacttgccgcctacccgcttgcccggagggaaacgaaactgaataaagccgtttttgccttgctgatttccattatgatcatccctccgttaacgtccatggttcctttgtaccgaatggtcgtggacgccggaatggtcaatacacacgcaatcgccattttcatcaatacagcagcttacatgcctttaaccgtattcttatattcaggctttatccgatcgaccattccaaaagagcttgaagaagccgcaagaattgacggcgcaggcatgctgaaaatcttttttacgattgtgtttcctctgctgaagccgatcactgcgaccatctgtattatttcttgtgtctttatttggaacgactatcaatttgccattttctttttacaagatcaaaaggttcagacattaacagtcgccatggcaagtttttttggagaaaacgcaaacaacctgcatttagttgccgcagcggcacttatggcaatgctgccgatggttgttctgtttttggcgctgcaaaaatactttattgccggcctgtcttccggagcggtaaagggttaacattaaagggggaagcaatatgaaaaagattacatttatcggtgcagggagcacgattttcgccaaaaatgttttgggagactgcctgttaacagaggcactgaatggatttgagttcgctctttacgacattgatcccaaacgcctgcaggaatcccagctcatgctcgaaaatctaagagaccgttataacccaagtgtggccatcaacagctatgatgacagaaaactcgccttgcaaaacgcaggctatgtcatcaatgcgattcaggttggaggatacaaaccgagcacagtcatcgatttcgagattcctaaacggtatgggttgcgccagacgatcgccgatacagtcggcatcggcgggatattcagatctctcagaacaatcccggtcttatttgatatcgcaaaagatatggaggaaatgtgccctgacgcatggttcttaaactatacaaatccaatggccactcttacaggcgccatgctccgctataccaatatcaaaacaatcgggctctgccacagtgttcaagtgtgcacgaaggatttatttaaagctctcggaatggagcatgacggaattgaggaacgcatcgcaggcattaatcatatggcttggcttttggaagtcaaaaaagacggcacagatttatatccagaaatcaaaaggagagcgaaagaaaaacaaaaaacaaagcatcatgatatggtgcggtttgaattaatggataagttcggctattatgtcacggaatcgtccgaacataacgcagagtatcacccatactttattaaacggaattaccctgaactgatcagcgagctgcaaatcccgctcgacgaatatccgagaaggtgcgtcaagcagattgaaaattgggagaaaatgcgggatgatatcgtcaataataaaaaccttacgcacgaacgctcaaaggaatatggttcaagaattatagaagcaatggaaacaaacgaaccattcaccttcggaggaaacgtcttgaatacagggctgatcaccaaccttccttcaaaagcggttgtggaagtgacatgcgtcgccgacagaaaaaaaattacaccgtgcttcgccggagaactgcctgagcagcttgccgccttaaaccggacgaatattaatacacagctgatgacaatcgaagcggctgtcacacggaaaaaagaagcggtttaccaagctgcaatgcttgatccgcatacaagcgcggagctttccatgaaggacatcatctccatgtgtgacgatttatttgcagcacacggcgattggcttccggcatacaaataaaaactaggggaccgctctcccctagttttttggttttgtttcgccttcccaggccatcatgccgccttcaacattgactgttttaaagccttgctcatccaggtacttgcagacgttcatgctgcgcattcctgagcggcagataaatacgtactctttgtctttatcaagggtttccattttttcaggaatatcccctatgcgaatatgaacggcttgcgggatcatgccttccgctacctcttcatcttctctgacatcaattaaatataattcttcgtccgcctcaattttttctttcaaagcggctgtgctgatttcttttatttccaaagaaaacactcctattcacagtgatcatgttcagtatatcaaagtcagctgaacgattgctattctgagactgatgaaaaaaatccccttttggcaaaggggattttttctaggcttagtttgccacaatattgacaagcttgccaggcaccgcgatgattttccgaatcgttttgccttcaagctgctctttgaccttttcatctgcttgagcaagctgttccagctgttctttcgttgcatcggcaggaacctgtaatttcgcttttacttttccgttcagctgaataacgatttcaacttcatcatccacaagttttgtttcatcatatacaggccaagcttcgtaggcaattgtgccggaatggccaagcttctcccaaagctcttccgctaagtgtggcgcgacaggagaaagaagcttcacgaagccttccatatattctttcggcagttctgttgctttataagcttcattaataaagaccatcagctgggaaatacccgtgttgaaacgaaggccttcataatggtctgtgactttcataaccgtttcatgatagacgcgctccaatgtttcacccgcgccttcaacgattttgtcattaagctcaccgctgtcttcaataaataggcgccatacacggtcaaggaaacggcgcgcaccgtctaatcctgattcagaccaggcgattgaagcatcaagaggtcccatgaacatttcgtacaatctcagcgtatcagcaccgtgagaggccacgatttcgtcaggattgacaacgttccctttagatttactcattttttcgttgttttcgccgagaatcattccttggttgtacagcttttggaacggttctttcgtcggcactacgccgatatcataaaggaacttatgccagaagcgggcatacagaaggtgaagcacggcatgttctgcaccgccgatatacatatcgaccggaagccatttttccaatttttctggtgatgccagctgatccggattgtgcggatcaatatagcgcaagaaataccagcagcttcccgcccattgcggcattgtattcgtttctcttcttccttttttccctgtctcagggtctgtgacttccacccactctttaatgttcgcaagcggtgattcgcccgttccgctcggtttgatttcatccgttttcggcaaaatcagcggcagctcctcttcagggacagctgttgacgttccgtcttcccaatgaatgaccggaatcggctcgccccaataacgctggcggctgaagagccagtcacgaagacggtatgtcactttcttctcaccgtttttcgtttcttccagccaagcgatcactttttcaatcgcttcctgtttgtgaaggccgttcaggaaatcagagttcacgtgctcgccgtcgccagtataggctgcttcctcaacgttccccccttttacgacttccttcaccggaaggccgaatgttttggcgaattcaaaatcacgctcatcgtgtccaggaactgccatgacagcacctgttccgtatgatgcaagaacataatccgcaatccaaatcggcagtttttctccgtttacaggattgatcgcatacgctcctgtaaatacgcctgtctttgttttcgcaagatctgtgcgttctaggtcactctttgattgaatttctttgatataagcttcaacagcttctttttgctctgccgttgtgatgttttccaccaatgcgtgttccggggcaaggacagtgtatgtagcgccaaacagcgtatctggtcttgttgtaaacaccgtaaaggaatcatcatgtccatctatagcaaaatgaacgtgagcgccttccgaacggccgatccagttgcgctgcatatctttaatgctttccggccaatcaagctcttccaagtcctcaaggagcctgtccgcataagcggtgattttcagcatccactgcttcattgggcgtctctctaccggatggccgccgcgttcgctcttgccgtcaatgacttcttcgttggcaagaacagtaccgagcgcagggcaccagtttacaggcacttcgtcaacgtaagcaaggcctttttcgtatagctttaagaaaatccattgcgtccatttatagtattcagggtcagtcgtattgatttcgcgatcccagtcatatgagaagccaagcgcttgaatttggcggcggaagttatcaatattctgcttcgtaaacacagcggggtcgttccctgtgtcaagcgcgtattgttcagctggcaggccgaatgcgtcccagcccattggatgaaggacatcatagccctgcatgcgcttcatgcgggacagaatatccgtagctgtgtatccttcaggatggccgacgtgcaacccagctccagacgggtaaggaaacatgtccagcgcgtagaatttttgtttttcattattatcaagagtggcaaatgttttgttttcaagccaatatgtttgccatttcttttctatctctttgtgctgaaaactcaaagtaaaaacctccttctgattgaatacggcgtgtatggttcaagtattgacgggaaggagaggattattcagaatattcccaaactaaaaaaaactccctcatccctaaaagggacgagagactttcgttttcccgcggtaccaccctcgttagcgcggcatacgccgcactcacttgatacttttaacgcagttatgcgtcagcggcttttcaccgctgcaactctgaggtgagttcggaaacaaacttgattgactttcaccagccgtcaactctctgcaacaatatctgtttcttactgctcctcttcattgttcttatcgcaaccgtaatctaactgtattttatagaattctgttcataagtgcaagcaggtttgtatacaatgggaatgtaccctgaacgggcggagattgaggacaattattcgggtggagttttggtttgacgtttggactcggccggttcgccgccgctgttcagttctctcacaaagtcaaaacttctgagaacagcttcaccgccgtagcctgagataatggataagatgacaagttgaattcctgaatcggggtcagcggataatacaagtaaaatggaagccgtcatgccgataaaccaatcttccaaaaatccaaggtagataaaccgcttcgtcattctgggcttctccagcctgcctctctttttcacatgaccgagaatccccatgattcctccaattacacaagcaatgagtacctgatgcagcatcttcatcatcaccttcctaaagcccttatttcgtaaagcgacttcaggccatccagcccccttaaacgattccgatgattttcgatatctacataccggcaaatctgtaaaaagcttgtttcttccattatatgtgaacacatgatcggtaagcttgatgcattggattcatttttcacccagtgacattgacctagtcacctatttagcatgtaaaaaacctttccgttcatatgttcaaattctgttcttatttttagtgtatacgaggacaagccctaatgacaaacaacaaactgcacttgcttgaatcagaacatgtgttgtgctacggttactgtagaattcattttaaaaaggggaatatcaggctttcgcatagcaagctgacggcctaagggggatttatatggctagttttcaatcatttgggataccaggacagctggaagtcatcaaaaaagcgcttgatcacgtgcgagtcggtgtggtaattacagatcccgcacttgaagataatcctattatctacgtaaatcaaggctttgttcaaatgaccggctacgagaccgaggaaattttaggaaagaactgccgcttcttacaggggaaacacacagatcctgcagaagtggacaacatcagaaccgctttacaaaataaagaaccggtcaccgttcagattcaaaactacaaaaaagacggaacgatgttctggaatgaattaaatattgatccaatggaaatagaggataaaacgtattttgtcggaattcagaaagacatcaccaagcaaaaagagtatgaaaagcttctcgaggattccctcacggaaattactgcactttcaactcctattgtcccgattcgcaatggcatttcggctcttccgctagtcggaaacctgacagaggagcgatttaattccatcgtttgcacattgacgaatatcttatcaacatccaaagatgattatttgatcattgatttatccggattggcccaagtgaacgaacaaacggccgaccaaattttcaagctgagccatttgctgaaattgaccggaactgagttaatcattaccggcattaagcctgaattggccatgaaaatgaataaactggatgccaatttttcgtcgctgaaaacatattcaaatgtaaaggatgccgttaaagtgcttccgattatgtaaaaagatcccgctcacccagcgggatctttcagattgttgacaaaatcctaaaatggttttcattttaggattttgtcatcttttcagcgtgattgaaaacccttgaagtctaggaaggacgagcataggagcggagcgaatgttctaattcgtgagcaccgaagcgcaggcctgacaacgaatgcgagggtttgtcgacacgctgaaagatcccgctcatccggcgggatcttttattatgaagagattgatgcctgcttatttgtttctttagctgattttatccgtttgtcatatagaagcgttgtggcaatactgatcagcagcaataccaacagagataaaacaagagccctaatgccgtaatgatcgacaagcactcctccgaacaggggaccaatcattctgccgcctgtcgccgcactgttgacaaagccttgataaaagccttctttccctttaggggcaagctgattggcaatagtcggcacagcaggccaaacaagcatttctccaatagtcaggatcaccatcgcagcgagaaacatcggaaattgctttgcagtcagcagcatgctgaaagacacaataaaaatgataaagccgatgaccatttgcgcttttagcgactcggcccattttttcaccacaaaactgacgagcggctggccgagcacaatgagaattccgttaaccgtccacagcacgctgtataaggaaagagatattccaatgctttgtgtgtacgaagcaattgtggttgaccactgagaataagccagccatccgagtacatagcctccgcttaaaatgatcagtgcggcaaattttgctttgctgttcacagcatcgtaatcaagcacagacgtttgggacgcatctcccgtctgaatatttcgaaatccgaaatatacaataaagaaaaagaccagatacagcgcggcattcgccaaaaatacatatgaaaacgagaaagacgccacgacaccgccaagcgctgaaccgacagccacacctgcgttttgcgcgacatatatcgcattaaatgccttccttcccccttcaggccataccgatcctgccattgcgtagctggccggaaaaacaacaccggagccaaagcccacaatcgtcagcagcacaatataggctggccaatcatgaaaaaagacaaggcccatcaggcttgctaacgtaatggctatcccaagcataatcgatttaaaaccgccgattttatcaaacaaaaaacctccgcataaattgccagccacactggcgccggaattcagcatcaggacaagtccggctactgttaacgactttcctaaatgattatggatataaatcgtattcagcggccataaaaaagaagcacccgtcacattgataaacattccaatgactaaaattttaagagcacgcggcatactcatccccctttcttacctaaaaaagctcatgaaaaaaacgaaacctaaaacggctccgtacgaatccagttatcatagcacattcattctatctgtctctctcacatttttcaactgatgagcgtgaaaaaatctaacaaatattgtttgaaaaatgtaaaataaatagaaaaagggggcatattatggaaatggcattagcattcttaggttttctggcatgtctcattgcactgggctatggattatatcactttgtcagatatgtactgaaaaaggaaaaacgtttctccaagagacttttttggccgcttttcattggaggccttgtgctgctctttaccggagcagcattggcagaacctgacacttccgcagcaaatgccgagaaaaaatattcagcgctaaacgccgaatacaaaaacctcacaaaagagcatgaagaacttgagaaagaatataaatctgtcagctctgaagcaaaaaaattaaaagacaacaaagaagatcaagacaagcttgagaagcttaaaaacgaaaatagcgatctaaaaaagactcagaaatcattaaaagctgagattaaagagcttcaagaaaatcaaaagcagctcaaagaagatgcaaaaacgacaaaggctgaaaatgaaacactccgacaagataaaacaaagcttgaaaatcaattaaaagagacggaaagccaaaccgccagttctcatgaagacactggaagttcttcaaacaatacgagtaaaagtgatgaaaccaaaacagctgacaaagcagaaggctgtaatatcaaaggaagcaaaaacggcatctaccacacgccaggcagtacatactatgaccggacaaccgatccggctgaaatgttttgctcagttgaagaagctgaagccgccggttatcgggcgccaaaacgataaacaaaaagctccagtatgtctggagctttttctgtttcacaacgacgatttaatgaccttcttataataaagaactgacagaaaaccaaaaatggagtagagcgcagtatataacaccatcaccataatcatgggcgcccatatctctgatccgaataagaaccagccggattggacggcaaagtaactgtggaagagcccgacaacgagcggaatgccgaagttatacatttgtttgatgcgtattccctttattaggtcgccctgcgtaaagccgagttttcttaaaatcgtatagctcggtttttcatcttcactttcacccatttgtttaaaataaaggatacaacctgatgtaatcaggaacgttaaccctaaaaagccgacgatgaacatcaccataccaaacagtgatttttgcgcagcgcttgtatccaatcttgataaatgctcgtttttcttgttcacctgttgaaaaagctcatttgctttttccatttgatcttcatgtttcacattgacgccgataaatgtagattgcgccagctgaattcgggggtctttatccttgttcagctgtttaaacaggctgtcatccacaatgacagcgggcatgcccccgcttgtaaacgtgtaggatacaagaaactcttctcttaatcctttatattttaatggctgcgtctcatgtttgctttttactttaataacaccagagtccttgaaaaccattattttttgcagcaagtcggtgtatcctgagaaaacggcttctccagccgccacatcgactccttttacatctttgtcgctaacaacagcaagctgcatattgctgggatcgccctgcatctctttcggagttccatccataatatttgcaatgtcaacatttgcttgcaggacaggtgttgccttttttacaaacgagatgttgctttccctcaatttgttttcaaataacttggcatctttctcattcatgaatgaaaaatcagccgctacattttgttcagcggtcttttccgacgagtaatacgagatgtaagcaagagataacagcccgatggcgagcgctgaaacggttgtaataatcgtcagcagcagcgcattcgatttcattctgaacatgatcgatgacagtgacagaacctcagaaatatttaagtagccgcccttgctttttcgaatgatattcgagataaacgtaactgatcctttataaaacaaaaacgtcccgataatgacgctccccagaatgaagctcatcgcaacaaacagttcattaatggtcttaaattttccgccaaacagctcagaagacacatagtatcctgtcaaaatcaacacgatgcctaaagcgccgatcagcatttggaaaaatgatattttcttcactttgtcttcagtggaggacgttactttaaacaaagataaaatactctgttttttgataaacgtataattcatgatcatgatcaaaaggtaaatgccgcagaacacaatgaccgtttggaccaaggcctgctcagaaaaatgcagtttcgcatccgctttgacatcgacaattttgaacagaatcatcaagacaagcttcgatatcgaaaacccggccgctaccccgatcgctaatgaaccgaaatacagcatgacattttctgcacttaagatgcgaaaaattttatgcttcgtcattccaattaattgaaacagcccgatttctttactccgtctcttaataaaaatcgtattggcatataaaatgaagatcgccactacagccacaagcaaaatcgaagcggttttaatagccgcggctcccttgattgaagccttcacttcgttaattgctggatcatactgcagcgtgacaaaggcgaaataaagcgccacgctaaagatgagcgcaaacacatacaaatagtaattccggagattctttttcaaatttcgcaggatgagctgattaatgttcatgctgcaccccgcctaacacgccttgcgttttcataatatcctggaaaaacgtttgcctgtcctggccccctttattcagctgtgtatacatttgcccgtccttaataaaaatgactctgccgcagtagctggcagcgacgggatcatgggtaaccataataatcgtcgcgttgcgtttttgattgagctggctcagcttatttaatagatcggaggccgatttcgaatcgagcgcgccggtcggttcatcagcgaaaataatgctcgggtcatgaataaacgctcttccagcggatgttctctgcttctggccgccggaaatttcattcgggtatttatcccgcaattcatatattcccagttcctttgcaacttcctcaaacttgcgattggcttccttttttgatagtttcgtgatcgataaaggcagaaggatattctctttcactgtcaatgtgtctaacaaattgtaatcctgaaagataaagcccaaatgctgttttctaaattcagccagctgcttttccttcatagccgtcatgtcatttccattaatatgaatggttccgtgactgacctgatcgattgaggacagaacgttgagcaaagtggtttttcccgacccggaagcacccataatactgacgaattcgcccttttcaatgtgaatatcgatgcccttcagcacttcctgtttattcagcttgtttccataactttttcgaattttattcgcttctaaaatcaccatttacgcagtctcctttatattggataatctcattataaaaaggaatgccgggcttttccttcgatacggcgaacaaaaaagaaaagcatgtgacattttcgtcacacgcttatgacatgttcaaattgattccgtattggaaaggttaatgtaaaaactgttcccgcaccaaactccgactcaacatcaatatggatcaataacggcgccgctgctttttttgccaagtacagccccatgccagttgacgcttgatcatggtgatccgttgtggatgtaaaccctttatcaaaaatacgcggtacatcttttggatcaatgcccctgccacagtccttcacttggagctgcgtctgttcccctttttgaaaacttttgatctcgatttcagaggcttcgctgtatttcaccgcgtttgtcagcagctgcctgatgataaacgccagccattttgcatcgctcagcacttctttggcctcgagctgtatgtcaaaaccgatccctttttggatacaccacgattgcaaatctttgatttctttaaagatcaaaggctgaagctgaatgaattctacagacagatcgttttcaataaatgatatccgtttttgatgaagctgctgatcaagaagcagatgaatacgcagccattcatatgacagctgggatttcagtgctttttcttccattctatcaatgattaaatgcatcgctgttaatggagttttgacctcatggatccatgccatcagctcatctttttcattttccaatgctaagcgatgccgtgctgcggtctgcttcaagtgttctgtttgcccggcaatgcttctttcaaccattgcttcaaacggcgtttccggttcatttatggctgtcacatcgagattgttctcccatgttttcaagcttttataaaacgctgtttctttccgatagcggaaccaaaggaatatgataaaaaacaaaatgcacaaatacaccatataaagtacattcccaaatgatatggaaggatcgacaaaaacaatgaacagcatcaaagcctgctgaaacaaaaaagcggcaatccagctccgcctttcgataaggaatgctttaatcatagaacttgtcctcttccttcgcgatgtagccctggcccacctttgtctcgatatatgcaccaagctgcagggcgtccagtttttttcgcaggcgattgacattgacggtcagcgtattatcactaacaaaacgctcatcgttccacaagcttctgatcagctcttcccggctgacgatcttgtttttttgctctattaattgttttagaatgaacatttcatttttggtcagttcaacagatcctttgtcattgctgacgaggttctgctccgcgtctacagcagcgccgcaccacgttttaatcgtattcggctccgtattataatggtgcacacgccggaacatcgcttggattttcgcaatcagcacatcaaaatgaaatggcttttggataaagtcatctgccccgagctgcatggacatcaccatatcagcaggatgatcccgggaggataaaaagagaatcggaacatttgaccgggagcggatcagccggcaccaatgaaagccgtcaaatttaggcagctgtacatcaataatgacacaatcaggattaaccgccgcaaattcctgcagcacctgactgaaatcctgaatgccgtatacatcataggaccatcccgttaaacgatccttgatttcatgaaacagcgattcatcatcttcaatcagcaaaagtttaaacaatcaactcaccgcactttttccttttttatcaagtgtatagcaaaacgctatcatgcgctatagaaaaagccggctgtctcagccggctcgttcgcattatagttctcttctcaacgctgtcagcacgttggtttttgttgcttttctcgccgggttcattccggaaatgactgcgacccctccgcaaatcacaacggcaatgatcacaagactcgccgggatgtaggagaatgtgtaattcaagtcgcccgcatcgcttccgcttgtggccgcaagaatcatcggaacggccaggttgacaaggtagctcacgccgtaagaaatgataatcccaatcacacagcctaaaattccgatatacgcgctttccatcaagaacattcggcgaatgattgacgggctcgccccaatcgctttcataatgccgatctcttgcgttctctctgtcaccgccatcgtcatcgtgttaaaaatgccgatcgctgaaatgataactgcgatacatccgacaaagatcagtccgattttgaagaccatgaagaaggtattggctccctcaagttcagtagtcactgatgtgacatagtacccgtcatctgttagatcatttgtcagctgttccacattctcaaacttatcagcaaaaacaccaatgttcgtttcaacatttccgcctttgaaatctaagaattccgaaaaatcttttttgaattgatcactgataaaaatgtttgagtcctccatccagtcttgagatggtttttttgtaataccgacaattttaaagtcatatgtttttgtttttgtaacatcccctgttttaggatctgtcttcgatacacttagttctattgttttgttcagaatatctttcgtatagccctttggttcttttatatcttctggatttccttttgcttcttcgatttttttgttatattcttccgattcttttttcgtcaataatctctttgcgaagtcgtatcctactacgatttcattttccgactttgcgactcttcccttttccaattccatattggcctttaattcatcattcatattagtaaaaatgagatttgagctttcatttgtacgattgcctaaagtagctttgtttggttcatacacttgcgttctttctacaactgaccttacgtgatcatacttctctaaatcagcttttttaataggcttgtctccttccttgcccattacactgactttcgttacaatctgctggctcattgtcatatctgtaattgtcttttgaatcccaaatccaacggacgacaacacaaccaaaaacgcacacgccattgttgtcgccagaatcgtcataaagacgcgaagcctgtttttcttcatatttcttctgataaaatgaacctgatccttaaacctcaacggtaattcctccttttagcacaccatcatgaagctgaaattttgaatgtccgatagaagcgacttcatcatcgtgagtaatgatcacaaatgtaatgccacgctcacgattcagctgctggatcaattccagcacttcatgttccgtttctgaatcaaggcttcccgtcggctcatccgctaagataatcgaaggatttaaaatcaatgctcgagcaatactgacacgctgctgctggccgcctgacagttcattcggataatgagcggcgtggttttccagaccgacgcgtttcagcatgtcctgcaccttttgcttccgctcagatggcttgattccttttaacgccagcggcatttccacattctcatacgtcgttaaacccgggatgagctgaaagctctgaaaaataaacccgaaatggtcaagccgaaattgcgcccattccttttcattaaaccccgtaacatcagtgccattaatgacaatccgcccttttgtcggcgatatgtagccggaaattaaattcaaaagcgttgatttccctgagccgcttcgtccgacaatgcaggcgatttcccctttcgccacgctcaatgaaacatccttcaatactggaacttcattctcacggcccttttttccgatcgtgaaagaatggtcgatatgctgaacatcaatcatatgttctctctcccttacaaaagtttcattttttataaatcgcaaaataactaatcaagaaaccgattaccgcacctgtacccatgccaatgagataaccggcaaagctctcgcttgcagtaaatccaaaatagccgaagcccatgattcctatgataataacgatgatctgcaccgggcggttaagcggcttccataagaagaaatatccgtttctttcattagacattttaacaaagctaatatagccgatgatgtaaaaaatgatagtcatgatagccggaatgactaaataatatggtgaattctcagcccatttcgagtctacataaattatcggaatgaaatactgcacccatttaggtactggaccatggataaaatctattgatccgccaaaaaggatctcgaggttgatcgcaggcaggctgatgagcaaaaatggcgaaatggccacggtaaatgagactagaagctgtgcgaaactattgcctgtcaaagctccacccgccataacaagcgaataagccagcatgctgacaatgatcattccaaggctgtaattgtgaaaataaacggcctgatcaggcttcaaaagtatgatcagcaaaacagataaaacataacctatgagctgcggtatcacaatcaccattccgccagtaaggaacttcgcatgaaatatctgccctcttgtatacggaaggcttaatgtaaaatcaaaaaagcccttgcttcgttcaatccctagctggctgaccgccaaaacgactccccaaatccaaaacaatgagataaatgagctgtttaaataatcaacgctgaatacgcaggggccgacccaattttcttttccagtgacacagccttgatagatgagatacatatttaaaattgataatggattacccaatataaaaaccaaaatggtgataactaaggcgactttattctgccgccactctttgtaaagcagtccggaatccggcaactcacttccctccaaacctatggcatttcttacacttttgttttcttataaatagagaagtagctcacaaagaatccagccactgccccaatgatcatacccaaaatataaccaataatggaatgtccggtatagtatccaaataaaccaaatccaaggatgccgaaagccataaccagaatttgcaccggacggtctaatctgttccataagaaaaagtgtccgtttcgttcacttggaagcttcttgaagcttataaagccaatcaagtaaaatagcatgctcattacggctggaatcaataaaagatatttactgttaatcagccattcatttacaacgtaactaatcggtactaggttcgataaattgcttgccagagagaaataactctcaggggaagggaatatttcccatatattcgcaccaaaaacaacttctaggtttccaaccggcaatgcaataattaaatacggcaatatagctgctgaaaacgccgttaacagttgggcaaaagcatttccagttaacgctccggcggccatcaccagtgaaaaagccataaaacttatcacgattactccaatgctgctgtgctcaaaaaagtagacgtgttcagggttatagacaagaatcagcagccatgcaagtaaaaagccaatcaattgtgacagcacaatcacaaaaccgcctaaccaaaattttgtctgaaaaatttggcttctgttatacgggaggcttaatataaaatccatcgtgcctttcgaacgctccattccgaggaagcagaccgccaaaatgacacccggcacccagttgatatctatcagattgcttatggaataattcacaataaaatcacaatattgcgggtcttggcgatcaagacacccttgataagacaaatacgtattaacgatagaaagcggatttgccaatactaaaaacgcgatacttaacaaaatcaccacttgattctgcttccactctcgatagaggagacctcggtctaccatctccgcttccctccaaacttcgcaatgaacacttcttccaggttgacaggaagctcattccacacttttggcttcagctctctcaaaaagctctttttctcctcatcgcttttcggaatcagcactgtgtaaaacacgccggcctgatcgagcatcggaatgttttgctctctgatggccaaattgacatctgtatcgaaggccatttgaattttaatgtattcttcttttaactcatcaagatccatgacgttggtcaggctgttatcttcaagaaaaccaattcggttgcacatccgctctatgtcttcaagccggtgggacgtaatcaggatgctcgtatcacgctctgccacttcatcgaccatcagctgcagcacatcatgccttgtcaccgcatcaataccatccgtcggctcatcaaggaggatcagcgccggtctcgccgcaaacgacagaacgagcgatagctgcttttttaagcctgtcgacagctcacggtattttttcgtttccggaatttcgtatctgttcatcagctcattcgcgtacgtgacatcaaatttcggatatattcttctcaaaatatcgactaactgcttgtatgtatacttatcgtaaaacggattttgaacaggcatgtagatgatattttgtttgactttcgggtgctttttgatttctacgccgtcaaataaaatcgttccgctgtcagcgaaaatgatttgctggattaagcgaagcatcgtcgttttgcccgatccattgcgtccaagcaatccaaagatttctcctttttcgattgttaatgaaacatcttttaatacttgattgccgtcaatcgcttttgacagctgccgcagttcaatcattttttttgcctcccttcacatcagcgctgatttcctttatccattcgtgcagtttttccagctcaacccctgcatagtgtgcatcgatgatgagctgtttgagttgctctttaatcatcgtcatcttcccttcaaccagtgtcgtttttgcattctccgatatataggtccctctgccccgcagcgtttcaataatcccctctcgctcaagttctttatacgctttgctgacagtgttcggattcgcaataatgatcgttgccaattctctgacagaaggaagcttatcaccaggcttcatgatccctttcaaacaaagctctttcatttgctgaataatttgttcgtaaatgggtgttgagcttcttggatcgatttgaatcatttacttccctactttctatacgatctgaaccttttatagataaaaatgatcaattatacttttttgccattcaaaaccgatcatcacaagaacaagaaaaaaagaacaagcgatcacagatgccgcaatcagcattggcacgttacgtttgtttcgttttttatgtttcataactgcctcccttaatgtcaatatataaatgattttatattagtgtctatagtgtattacttcaattagtacacttaatacaataaatactttgactcacaaagtcaatcctttttttacaaaaaaacggacccttttaaaagggtccgttttcctacacatcaagagggtgctgcaggatcatattattttgcaaagattgaagctgaagtctcattctgtacagctgttctctctgctgatcatttgacgacagccatagtttattcaaggcatttaccgcatcttctagctgcatttgtgcatcactatattcttgatcgttataatgctcttgtttagaagcgattttcagctgttcttcagcataatcataggcctgcatacattgctggagatgttcatctactgattgtcttgttgccacagtaacccctcctcttggtaatggaaatcatccatcattcatattgtagcctcatctgactttattcaataaagtaatttatggtcgatattcatttgttctcttgtgaaatgcgtgctacaattttaggatgcaatcgtacgcaaggaggcacatgaattgtgatacagaacaatccttttccttattcaaatacggaaaaacgctatcatacattgaattatcatctcagagatcatttcggccataaggtgtttaaagtggcgcttgacggcggctttgactgcccaaatcgggatggcaccgttgcccacggaggctgtacgttttgcagcgcagcaggctccggcgattttgccgggaaccgggccgatgatttaattacgcaattccacgacatcaaaaaccgcatgcacgaaaaatggaaggacggcaaatacatcgcttattttcaggctttcacaaacactcacgccccggttggggtgcttcgcgaaaaattcgaatcagtgctagcgcttgatgatgtggttggcatttcgatcgccactcgcccggactgtctgcctgatgatgtcgttgattacctggcagagctgaatgaacgcacctatttgtgggtggagcttgggcttcaaacagttcatgaacggactgcacttctgatcaaccgcgcacatgattttaactgctatgtggaaggcgtcaataaattaagaaaacacggcatacgtgtctgctcgcatattatcaatgggctgcctttggaagaccgggacatgatgatggaaacggcaaaggccgtcgcagatttggatgtccagggcattaaaatccatctgcttcacctactgaaaggcacgccaatggtcaagcaatatgaaaaggggaagctggaatttctttctcaagatgattatgtgcagctcgtctgcgatcagcttgagatcattccgcctgaaatgatcgtccaccgcattacaggtgacggaccgattgagttgatgatcgggccaatgtggagcgtcaacaaatgggaagtgcttggcgccattaataaagagctagaaaatcgaggcagctatcaaggaaagttctttcagcggcttgaggaggaatcagcgctatgattttgaagaaaattcttccctacagcaaagaactgctgaaaatggccgcgggagaaggagatattgtcgtagatgcgacaatgggcaacggacatgatacacagtttttagcggagcttgttggtgaaaacggtcatgtgtacgcattcgacatccaagaatcagccgtggccaatacaaaggaacggctcggtgacatgtatcaagcgcgaacaacgttatttcacaaaagccatgataaaatcgctgaatccctcccgcctgaaacacatggcaaagtggcggccgcggtatttaacctcggctatttgccgggcggggacaagtcaattacgacaaacggcagttctacgatcaaagcaattgaacagcttctcggcatcatgaaagacgaaggtctgattgttctcgtcgtctatcatggccacccggaaggcaaagctgaaaaaaacgacgtgctcgagttttgccgggacttggaccagcaaacagcccgtgtattatcatacggatttatcaatcagcaaaatgacccgccatttattatcgccatcgaaaaaaaagctcagatcagcaaatgatttgagcttttttctttgagtttttcatccagaacattttttgaaatttccggtaggctctgccgttgatataaaagaaaagggaggtttttccgctggctttgatcagcttctttgcgagccggcccatttccttttggcccgccactttatcatctgacaaataaacgccaagcaagccgcgattgattaaacgatggaagttttcatgcggaatgccttgtaaatgctcgtcagctttatggataaagtgttcaagccgattcatcatctcttcatgagactgataatacgagcagaaattcaagtctccttccagcaagtcctcctcttgatcaatcaaataatcaagaagaatatgaaggccctgtatgtaaggaaaataactgtcgcggatttttttagcggtgctttctgtgaaatcaggctggaacgaatacgcaaccagacagaaaatgcctaacgttgagcctgcacaggctgaaaattcataccattccatctcaggcagctctgattcatattgagtaaaccacttttcaagccgcggaacacgctcatgctcaataacgtgcttatgcacctgcaaatcgcaataatagccgcacagttcaagcagataaggtttaatcatgtcatagtgctcaatggagccgagaacacgctggcacgttttgaccagttcatgcaaatatccgctgtcatcctgttcttccctgaattgataatagttttgcagttccgccccaactgtcagtgcgtcctgcattgaggcatggagcatccgaaaatcctgcgggtccagcgaggtgctgcggtcacacagattgtccaaataatcactaatcgtttgatacgcgatgataaactcgacacatttctgtttttggctgcctgacaataaggccagtatgccgccgccttcacagtgaaacgttttgtcccgaatacttgcggttgcctgtgctttcaattcactgttatgaatcgattctgatttttgcttccatatgtccagctcttgatgaacgagcggaaaaatatctcgatatacctttgccatcaatccaaaaggatgttccggtactgtcaacacatgcaccccctactagttcaaatatattgatcagtaaacgctcttgctgctttaaaaacatcttctctctcgggttcattgaagatctcatggtaaagcccttcccactctctgtatgctttattataagaagcaacaccattaaaccacttgatgaccatcgttttgtcaacaagcttgtcatcaccggcttgcatcacaagaagcggaactttcaaaaatgcctctgtcggcaccattgccgattcaattgtctttaaaagctctctgtaccatctgacagaaactttcctgacgtataacgaatcattttggtcagcctcaatgacgtcctcattgcgcgtcgccatatcaattgataatcccgaatcaaccttaagtgacggagcgatgacattcaggccttttgatgcaagatcaagcgctttattcactttaatttgcagtccgagacacggtgatgataaaataattcccgtaatcttgggatttctttgctgtttaatccattcaatcgcgaccagaccgcccatgctgtgacctagaagaaaaaccggcagatcaaaggttcgcgctttatctatccaagcatctacttcatcaatgtattcttgaaacgagcgaatatgccctctcgctcttgtcgttgttccctgtccaggcaaatcgcccatgacaacgtgataacccgaagaccgccacatttcaatcagccatttatatcgtccatgatattcacttgccccgtgaatgattacaatcacggcaacaggtctgtctgctttccaggtccacatgatcttcacctcatacgaaatttaaatagagaaagaaggatgaatcttatgatctacccttataaggaacacaagccagatatccacccaacagcctttatagctgataatgcaacaattaccggtgatgtcgttatcggagaacagtccagtatttggttttctgttgtcataaggggagatgttgcgccgaccagaatcggaaacagagtcaatatccaggatttaagctgcctccatcaaagcccgaacaagacgctgctcattgaagatgacgccacgataggccatcaggttacacttcatagcgctgttatccgcaagaacgccttaatcggcatgggctcaatcattttagacggagccgaaattggcgaaggcgcttttattggtgccggcagtcttgtcccgcccggaaaaatcattccgcctggccatctcgcctttggccgccctgcaaaagtcatccgccctttgacggaagaagaccgaaaagatatgcaaagaatacggtcagaatatgtagaaaagggccaatattataaatttcttcaacaaacataagacctgcttcgtcttactttaccatttttcaaattatatttgaaagcaataaccatcgttaacccggacgtcataacagttcgggtttcgatttttccataaaacgttcacatatagcatgaaacgtatgacttttatcttatcacaaaactataaacagcctctgcaaaaacacatacctattctttcctgttctctattttctatgagcacacacaaaaagagcccactgggagctctttttgtcagctgatatttcgttcgctggcagctgctgcattttttttgtgaaacccttttccatagtacacagccagcaagatgagaaaccatatcggcccgataatcacggctactcttgtatcaggactgtaagccataagaatgacaacgaatgctagaaatgccaatgacacataagacgtaaacggaaataaaggcattttgtactttaattgtttcttttcttcaggcttcaaacttttcctgtattttatttgagaaagcaaaatgattgcccacgtccaaatcgctccgaacgtcgcaatacttgtaacccaagtaaataccttcgcagggacaacatagtttaacagcactccgactaataaagcgcccgctgaagccagaacagctttacccgggatgccgcctttcgtcagctgaccatatgcttgtggcgcctctttctgttccgccaagttaaacagcatccgccctgtgctgaaaataccgctgttgcatgaagacagcgcggctgtcaacacgacaaagttaatgatacctgcggccgatggaatgcccactttttgaaatgtgagaacaaatggacttccttgagagccaatttcctgccacggataaatagacataatgacaaataaagcgcctacataaaaaatcaaaatccgccaaaatactgtatcgattgctttggctaacgatttttgcgggttttttacttcgccagccgtcaccccgatcatttcaatccctaaataggcgaacatgaccatttgaagagacaatagaaccccttttaaaccatgagggaaaaatcctccgttgttccacaaattgctgattccggttgcaatgcccccattgccgactcctgcaataatcatcaataaaccgacagcaatcatggataagatcgcaacaattttaatcaatgcgaaccaaaattccagctcaccgtaagctttgacagccaggaaattaacacccgtcataatgaccagtgccgataatgcccaaatccagtttggcacgtcaggaaaccagaaccccatatagatgccgacagcagtaatttcggccatacaggtgacaacccataaaaaccagtagttccaccctgttaaatagcctgcaagcggtcccaaataatcacgcgcatacctgctgaaggagcctgcgaccggtttttgaatggccatttccccaagcgctctcataataaaaaacatgaccaggccgcttgcggcatacgctaccaaaataccaggccctgctaattgaatagctgatgcggagccgaggaacaaccctactcctattgcagctcctaaagacattaaagaaatatgcctttcttcgagtccgcggtgcagctcttgtttttgtttttgcatgctttcttctcccctagaaaaaaattcattaaatcatttttctgaatatttcgtatgaattgggtaaaccaatgatgatggagaaataaaaggataacaacaaggctttcgactactcgaaagccttgttgtctgttacacaaagatgacttctttaggctgatggctcagctcttcaggcatataccgtttttcaatattgatgctgtgccagatcataaagattagcacagtccagattttacggctgttatcagccttgtccgcacaatggtcttcaagaagctgaaggacataatccttatggatataagcatccgtttggctttcctgaataatattccgcacccattcgttcatttcgtttttcagccaatgacggatcggtacagggaaaccaagctttttgcggtttaatacgtgctcaggcacaattccttcagcggctttgcgaagaagatacttcgtcgtgccgttcttcgttttcagctcatcaggaatttttgaagcgacgtcgaatacgactttatccaagaacggcacacgcagttccaaagaattcgccatcgtcattttatccgcctttaacaaaatgtcgccgcgcatccaagtgtggatatcgacatactgcattttgttgatatcgctgtacgagctgctttctgtaaagtaagtcttcgtcacatcgcgatatgaaaggttcggattataatgcttcaacagctgctttttgacagactcttcaaagattttagcgttaccgatataacgatcctgaagcggagtgcagccgcgctcaagcaggctcttccctctcataccttcaggcataacggcagcaacgtgcagaagcatctttttcaagccggacggaatccgttcaaacggtttaagcgaaagcggttcacggtaaatgttatatccgccgaagagctcatccgctccttcacctgataaagcaaccgttacatgttttttcgcttcttttgcaacaaagtacaacggaatcgctgccggatcagcaagcgggtcatcaaaatgccatacgatcttcggaagctcattcatgtattcctcaggcgaaatgactttgctgatattttcaatgcccagcgccgctgccgtttctttcgctacatcaacctcactgaagccctgctgttcaaagccgacagagaatgtttttaagcttggatgaaattccttcgcaacagacacaataaaggaagaatcaatcccgccagacaggaacgaaccgacaggaacgtcacttctcatatgaacgtttacagagtcatagatcgcgtctcggacttctttcacaagcttgtcttcttcagtctgaaccggcttgaagttcgctttgaaatacgttttgaatgtgatatcgccgtccgggcggattgtgaactgtgaacccggctctacttttttcacatgggcatcaagcgtgcttggttcaggaacaaattggaaagacatgtactgctgcaatgcctctttatctatttcaatatcattctgagcaaccattaaactttttctctctgaggcaaaataaacctgatcattgatcgttgtgtagtacaacggtttaatgccgaatggatctcttgccccataaagcacatgatcgtttttattccaaatcagaaaggcaaacataccgcgcagtttggacgccgcttcttctttatagtgacagtaagtcgcaagaagaacctctgtgtccgaatccgtgttgaatgtgtacccctttgcttcaagctcttctctcagttcaatatagttatagatttctccgttaaagataatccaatatgtttcatcttcatatgataaaggctgtccgccattttctacatcaataatgctgagccgtctgaatccgaagccgacgtgctcatcatggaaatatccatcactgtcaggaccgcggtgaacgatcatttggttcatttgtttgattagttcttcttgatcagcggtttgagctaacggatgcttgttaaaaaccccgacaaatccacacatagtattgcctccataattaaaattgtcatcattgaacccctatttatagacgctgtgaataatatttggtttcacagttatgtaaaaaaataaacatgaatacaacgataaaaaagggaaagccgcttaaccagtaagcggctataaaattattctcctaacgcttctttacgcagctgctccgctttgtctgtacgctcccaaggaaggtcaacatcgtgacgtccaaagtggccgtacgcagcagtttgtttgtagatcggacggcgcaaatcaagcattttgataatgccggcaggtcgtaaatcaaagttattgcgaacaacttcaatcagtttttcctcagaagcttttcctgaaccgaatgtgttgattgagattgacacaggctgtgcaacaccgatcgcgtaagcaagctgtacttcgcaagaatcagcaagctcagccgcaacgatgtttttcgcaacgtatcttgccgcataagctgcagaacggtctaccttcgtcgcgtccttacctgagaacgcgcctccgccgtggcgtgcatagccgccgtacgtatcaacgatgattttgcgtcctgtaagtcccgcatccccttgagggcctccgattacgaaacgtcctgtagggttgatgaaatattttgtttcttcatcaatcagctcttcaggaacaaccggattgattacatgttctttaatgttgcgctgaatttgctcaagtgtaatttcagggtgatgctgagttgaaataacaatcgcgtcaatgcggactggtttgttattttcatcgtactcaaccgttacctgtgttttgccgtcagggcgaaggtacggaagaatatcttctttacggacttcacttaggcggcgggctaatttatgggcaagtgaaattggaagaggcataagctctttcgtttcgttgcacgcataaccgaacattaatccttggtcacccgcaccaatcgcttcaatttcttcgtcgctcattgtgccttcacgggcttcaagcgcttggtctacgcccatcgcgatatcagcagactgctcatcaattgatgttaaaaccgcacaagtttccgcatcaaatccgtattttgcacgtgtgtatccgatttctttaatggtttggcgaaccgttttcggaatgtcaacatacgtagaagttgtgatctctccgcttacaagaaccaaacctgttgtcacagatgtttcacaagcaacacgcgcgttagggtctttctttaaaatttcatctaaaatgctgtcagaaatctggtcacagattttatccggatgcccctccgtaacagattctgatgtaaataaacgacgatttttactcatgatttgcttcctcctgcacaaggcctcccgaaagaccttgtatatatgatacggaactcgctccctcttatacaatgtacagttatattagagaatgttaattggcatatttatgaaataaaaaaaccttttccatcgaggaaagggtttggtctttgtgcctttcactcttatcgctcaaggaatcatacaaccttgcaacaggttagcaccttggttgtctcactcagttgaacataataaataacagagaaaccggttgctgggcttcatagggcctgtccctccgccagctcgggataagagtatccgctcaatgaaatatcttatcgtaaaagggtttgcaatgtcaatatgattcagaagaaataggcacctatattgagggaaaacaatggaaatgcacacacaaaaaacaataaatagtatagactatttgaaaatatatgttatactaattcacaattagcaaaacacaaaaaacgataaaggaaggtttcatatgaactcagttgatttgaccgctgatttacaagccttattaacatgtccaaatgtgcgtcataatttatcagcagcacagctaacagaaaaagtcctctcccgaaacgaaggcattttaacatccacaggtgctgttcgcgcgacaacaggcgcttacacaggacgctcacctaaagataaattcatcgtggaggaagaaagcacgaaaaataagatcgattggggcccggtgaatcagccgatttcagaggaagcgtttgagcggctgtacacgaaagttgtcagctatttaaaggagcgagatgaactgtttgttttcgaaggatttgccggagcagacgagaaatacaggctgccgatcactgtcgtaaatgagttcgcatggcacaatttatttgcgcggcagctgtttatccgtccggaaggaaatgataagaaaacagttgagcagccgttcaccattctttctgctccgcacttcaaagcggatccaaaaacagacggcactcattccgaaacgtttattattgtctctttcgaaaagcggacgatcttaatcggcggaactgagtatgccggtgaaatgaagaagtccattttctccattatgaatttcctgctgcctgaaagagatattttatctatgcactgctccgccaatgtcggtgaaaaaggcgatgtcgcccttttcttcggactgtcaggaacaggcaagaccaccttgtcggcagatgctgaccgcaagctgatcggtgacgatgaacatggctggtctgatacaggcgtctttaatattgaaggcggatgctacgctaagtgcattcatttaagcgaggaaaaggaaccgcaaatctttaacgcgatccgtttcgggtctgttctcgaaaatgtcgttgttgacgaagatacacgcgaagccaattatgatgattccttctatactgaaaacacgcgggcagcttacccgattcatatgattgacaacatcgtgactccaagcatggccggccatccgtcagcaattgtatttttgacggctgatgccttcggagtcctgccgccgatcagcaaactaacgaaggagcaggccatgtaccatttcttgagcggttacacgagtaagcttgccggaaccgaacgtggtgtaacgtctcctgaaacgactttctctacatgcttcggctcacctttcctgccgcttcctgctcacgtctatgctgaaatgctcggcaaaaagatcgatgaacacggcgcagacgttttcttagtcaataccggctggaccgggggcggctacggcacaggcgaacgaatgaagctttcttacactagagcaatggtcaaagcagcgattgaaggcaaattagaggatgctgaaatgataacagacgatattttcggcctgcacattccggcacatgttcctggcgttcctgatcatattcttcagcctgaaaacacgtggaccaacaaggaagaatacaaagaaaaagcagtctaccttgcaaatgaattcaaagagaactttaaaaagttcgcacataccgatgccatcgcccaggcaggcggccctctcgtataaaaaacaaaagccaagagcaattatgctcttggcttgttttaattgacggaatgcaaagaagtcagcttgtatgtaatgatggtccggccttcttcccattgaagcttctgcacttcagctgtgcctgacttttcgccaaactttgttttgcgtacatccattggaatctccatcggatatactcggtatccgtccttctctaacgtgaatatattttcatctatgcgaacttcttttccttttgtcacaatcagtgtattaaattcaacaggcattcccaaagtgaaatcccctttcgttctcttttttctttatcataacatatttcactgtcagcggtttttcatccattgtgtgagctgccgcacgatacgccggttttcttttggcgggaaataatgtgtgaatgtactgtagtaccacgtctccaccggcttatgcagttgttttagcttctcttcaaataaataggaatgctgaattgaaacattttggtctttttctccatggattaacagcacgggagcctgaattttgtttacttggtcaaacggtgtcctccattgatattcctcaggcacctttttcggtgttccgccgatgactcttttcatcattcgccgcaaatcctgccgctcctcgtatgtaagaatcatatcactgacgcctccccaggaaacaaatgaagctgcctgcccgcccatttcgatcgcagtgagcattcccataattccgccgcgggaaaaaccgaagatgtggattctatccttcttgacatttgggtgctgctgaagcaggcgaaaagcagaaaatgcatcctccctgtcttctcctgcaaaatcctcattgccttctcctccttgatttcctctgtaaaaaggagcaaacaccacaaacccttgggatgcaaactggataatccggcccggccgaaccatgcccacgcttttaatcccgccgcgcaaatataaaaatccgtcatattgtcccggttccgccggctcagccagaagccccttaacccgtaatccatttgacagatagcagatcgtatacaaacgcacatgctggcttggcgacggaaatcttcttttctctacaatcaaaacagccgcctcctttttttctatatgctttccttactccaaaattacatccggagaacctggttaggcattcacacatttttatac

SEQ ID NO: 5 - DNA, 1089676 bp, Bacillus subtilis
  source 1..1089676: mol_type = genomic DNA
ccatcatacgatatgtaaagcaaaaaaggatattaacttgatgcgaaataaggaggttgtctatgtgaacagatggttaaggctgagcttcgcctgtgtcggcagtatctttctgatgttcgccctggcggcttgcaagcaggaagaaacgctcacaaaagtcaaggtcgctgaagtgacccattcaattttttacgcacctttatatgttgctgagtctaaagggttttttaaagaagaagggcttgatgtcgatgtgaatacgacctggggcggagataaaacgatgacatcgcttctttccaacggctccgacatcgcgcttgtcgggtcagaaacatctatttatgtcgaagcgcaaggggctaaagatcccgtcattaatttcgcccagctgactcagacagacggaacgtttcttgtcgcgagagaagatgttgaacacttcgactgggatcagctgaaaggaaaaacgtttctcggtcagcgaaaaggcggcatgccgcaaatggtcggcgagtatgtactgaacaaacataagattgacccgcgtaaggatatagacctcatccagaacatagacttcgccaatattgccaatgcgtttgcttctggaaccggtgagtatgtacagctctttgaaccgcaggcttctctctttgagaaaaaaggcatcggccatatcgtggcttcattcggagaagaatcaggagaggttccttatacgacttttatggcgaaacaaagctatttgaagaaaaatgaagacacagccgtcaagtttacaaaggccatttataaggcgcagcagtgggttgaaaatcattctgcgaaggacatcacagatgccattaaagatgaatttgatgataccgacccagacgtcatcgaaacatccattgaacgctataaaaaacagcattcatattcgccagaccctctgcttaacgaaaaagaatgggagcttctccaaaccattatggatcaatcgggagaactgccgaagcacattccatacaatcagcttgtaaataaagaaattgctgaaaaagtcacctcggagaaataggaggcgccatctatgtctttcttacatgtcgaccatgtaacccatacttatttttctattaaagaaaaaacaacggctgtgcgggatattcatttcgatgccgaaaaaggcgatttcatctcatttctcggcccaagcggctgcggaaaaacaacactgctttccattattgccggtttgattgagccatcagaaggcagagttctgattgaaggccgtgagccgaatcaaaaagaacataatattggctatatgcttcagcaggattacttatttccctggaaatctatcgaggaaaatgtgcttctcggtttaaaaatcgccgacacgctgacagaagaaagcaaagccgctgcactcggtctattgccggagttcggcctcatagatgtggagaaaaaatatccgaaagagctgtcaggcgggatgcgccagcgggctgcgcttgcaagaacacttgcgcctaaccctagtctgcttttgctggatgagccattttccgcgcttgattttcagacaaagctgtctttggaaaacctggtattccgcacattaaaggaatatcaaaaaacagcagtgcttgtcactcatgatataggggaagcgatagcgatgagcgatacgatctttttattttcaaatcagccgggcaccatccatcagatttttaccattcctaaggaattggccgcaatgttgccttttgacgcccgtcaggaaccttccttccagacactgtttcaaacgatatggaaggagctgaattctcttgagaaacagcaaagaaaccattgatctgcttcacgagcagtatcaattcaaacagaaaaaggaaaagtggaaggtccattcctttcagcttgccatatttattctctttttctcgggctgggaaacctccagcaggcagggctggatcgatccgctgatcttcagctctccatcagctgtgtggcgattattgctggagaaacttggtgacggttctttactgtcacacatcggcgtcactttatttgaaacggtgcttggctttttgcttgggacgtttatgggcacgtgcctcgccgctttgttatggtggtctaaccgacttgccagaattttagatccgtaccttgtgattttgaatgcaatgccgaaagtagccctgggcccgatcctgattgtcgcgctcggtcccagttttatcagcatcattgcgatgggagccatcatcagcgtcattatcacaaccatcgttgtctataccgccttccaggaggtcgacgaaaactatacgaaagtcatgaaaacattcggcgcaaaaaagtgggttatttttaaagaagtcatactgcctgcatcctcccccgcgattatttcaacactaaaagtgaacgtcggtttatcatgggttggcgtcattgtaggggaattcctcgtttcgaaggtcggattaggatatatgattatttacggattccaagtcttcaattttacactcgtcttcttaagcctgctgatcatcgccatcttcgccactctgatgtatcagggcgtcgagctgctggaaaagaaatggacgaaggggaggacataaaaaacccggcacatgtgccgggttttttattcaatccatccagattctttcagttttttcaaactgatcggaagtacggaatccttcataataaagctgaattttttattgcgggaaaggttctccggaagctcgtgaaacaaaaccgggcctttcgtttcaaagtaatcagcttgcttttcaagcttttctatatctgcaaaatatatatttttcacaatcactttttcttttccgagaactttatactgtccgagatacttgaggcttttgactctcgcgcccgtctcttcctttacttcccggagcgcagcctcttctgcgcactccatcggctctactttcccgcctggaaactcatagcctctgtcctcatgttctgttaaaagccatttgccgccaaaacggcaaatcacccagacatgcttcgggctgtccgagaaaggctgatcgtcaaaggaaagctgaacagtattctgataataatctttaaactcgtacatgtttatccctcaaatccgttcctagctatcttccatacatcataccacagttacgtttcttcggaagccttttatcaaaaaataagggaaacccagcacgccgtcaggttctgcatgcagactagctcgtacagtttttttgcgatagcttttgccgaaaagtgcgaccgacgctctgggctttattatgacccgcgaacagggaaaagttacggtttgcgcttaaatttattttttaacgtttctaaaagatcgacaagcatctgaggaaccggtatgccaagagaactggctgtcacaacaatttgcacagattcataaagaatataaaacataatagccaagtcacgaattgatccctctgtattcagcagctgatcaaaaaagtggcatacagagatcagagccagcgtgactaattttttgacaagccgggcaaatacctttttaaatgacagtttgtgaataatggtttccttcaaagtcgtactgataaattcaattgccataagagagagcaaaatcagaaatgaatactgaaaacctccaaagaaaaaacccgctgctgaaacgctgactgctattaacgaaaagatgccaaagtctctatccatttatcccaacatcctttcacagaaacggccttacgatattctatggaaaacaagccgaacggattggatttttcagaaaaatggactggttgtcgcctatttttcagatacaaaaagaaaagccggacgtcttttttaagacatccggccgttctttttttggacttaacctaggtaagcttttagcatccagttatgtttttcaatattttgatggatcgcaagaagcatgtcccctgttgtttcgtcaccgacttcatcagctaaatccatgccgtttttcagctcttccgcgatgactgtgaaatcatcatatacgctttgaaccatttgttcagctgtttcatttccagccgcttctttgacagaagccgtttctaaggattccttcattgttgcaatcggttttccgttcagcgccaaaagacgttctgctaagtcatcaatataagttgccgtttcgttgtacagctcctcaaacttttcatgaagagtgaagaaatcttttcctttcacataccagtgatagttatgtagtttcacatacatgaccgtccagttggctacttgtttgttcactgcttgaatcaattgttctgacatggtatctcctccttgttatatgactatgtatacccttaatatcgtacgctaaaacctcttttttacccttatctgtcacgatttcttctattatgctacaattgttaaaaaacgggaggtggaatgtcatgacgcttctcattacgataagtattttgattgtgctggctgttttgcttgtaaccatttggacgactgtaaaagcctataatgtaaagcataccattgatccaccacaagaaaatcactctgattcacacaatcaatgatgatgtgaatgttcctcttctgactgattgctggcagcatcggcgtctccgacttggacttttaaggtcggcatgctatgctgtttttttgctgtgacatgggattggacagtgtatacaccatcttccttaaacgtcgtttccaatcggtatacgcctttttcttgtttcgccttaaacatttggcttgcgtctttttccccttctttccatacttcaaactctacttcatcggcatccgtcacagcttcatcaccatatgatacggctgcttcataagcagcgctttctccgggatttactttttcaggcccggtcagcttgacatccaaaacctcgggcgtctcagctgtatttgctttgctttcaccagatccgcatccattaagcaataaagcagaaaaaagcagaacaaccaacatctttttcatgccatcaccctttcatcgtttacctaaatagtagcaaacgcttacagcaaatggtacataaaatatgagacgtcacaaaaaagacctttttgcttatgcgcaaaaaggtcctttctattttagccaaatacttttagcaattcttctttatcctgtgaaagccagaaacgcattaaacgtttagcgccttccagatcatgaagcttcgcttggccgcactgcttttcattcgcagctggtatttctgtaatctctaccgcttccttcattgtgtcttcaagtagatcaacgatttccgctgatgtcggctctccgctcacaactagataatagcctgtctggcagcccattggagaaatatcaatgatatcaaaatgatcgtatttctcagcgtgagaacgaatcgtaaacgcgagcaaatgctcgagtgtgtgaatggtgtcaggcttcatcgcctgtttatttggctggcaaaaacgaatgtcaaatttatttacaacgccgtctgttcctactttatgcacgccgcaatgtcttacatatggagcaacaaccgcattatgatcaagctcaaaactttctactgaaggcataatggcactctccccttttttaaaaatgtaatttcattataacatacttttccgataagaattattgattaacttttcaatctgtgttttttttcttatacttgcatcagaaaggttgctgaagaaacatgaaaaccctattcatcgctctgatcagaggatatcaaaaattcatctcgcccctgacaccgccaacgtgccgcttttatccgacctgttcccaatatggaatcgaagcgattaaaacacatggcgctttaaaaggcggatggctgacaatcaaacggattttgaaatgccacccgttccatccgggaggagtcgatcccgttcctgaaaagaaacaaaaacattaattgttataaccgtttacgataagatccagttttccggttttaggatcaatgactaagccatggaccggaacgttttcagggaacagcgggtgatgtttaataacgtctacgctgtctttcacactcgcttccactgaatcaaagcttttaaaccattgatcaaagtctacaccggagtactttattgtttcgatgcgttcttccggaatccctcttgctttgattttttcaagcatgcttttgctgctgattttgctcatgccgcaatcgtgatgcccgatcacacacacctcatctgcattcagctcgtacactgcgacgagtaaacttctcatgatgcttccgaatgggtgtgtcacaagcgcaccggcacttttaatgattttcacatcaccgtttcgcaaattcatcgcatgcggcagcagttcaaccagacgagtgtccatgcaagaaagaatcgccatttttttatctggaaattttgatgtttgatacttttcatactctctttgttcagtaaatgtcttgttaaattcgagaatatcatttagaagactcatgttcgttgtccctttctattctttttactcttcaatatatcacaacccttgtttattcgtcataataaaaaaagacaaaccctctggtctgccttatttccccatgttatagcgttttttgaactgctcaactcgtccgcctttttcattgaatttctggcggccagtataaaacggatgcgtgtcagagcttacttctactttaatgacaggatatgtgtttccgtcttcccactctgctgtttcattagatgttttcgtagaggtgctgagaaaacggtagccgctgttgacatcctgaaatatcactttgtggttcttcggatgaattccttctttcatgtgaatctcctttcaataaatcgtaataattacgttttattctataaccttacaaacgttttgtcaatcttcttatatccttccctctgttttcacatcgtaaacctcatggcatttaagaataggaagaataatctaaccgaggaagcaaataataaacccaaaatacatacagaacgtctttttagaaaggtggtttacgattgtggatgatttagttttggccagaagcctctttggcacgacaatgggctttcatattattttcgcaacgcttggagtcggtctcccgctcatgattttagtggcggaattgatctatcaaaaaacgaaagatgaccattatgcgatcatggcgaaaagatggacgaaagcacaagccgttttgctgggggtcgccataccgaccggaacgatcgcgggcactcagctcgcgcttttatggccgggatttatggaagtcattggccgggtgatgtccctgccatttcaaattgaaatctatgctttttttgttgaagccctattcatgtcgatttatgtatacgctgcagaccgtttgtcacctgcaatgaggattgttgctgttttctttgtgttagtcggggcagcagcatcagctgttctgattacgaatgttcacgcttttgaaggaacgcccgccggttttaaaattttaaacggaaaaattacagatgttgacccgtgggctgcgttttttaatcctagcttttttatcactgccggccatgtcgtgctgtccgcgtttatgaccggtgcatttatcgtggcttctgttgcggcgtataaaatgatccggacgaggaaaaaggaaaaggtctatcgctttcaccggaaagcccttttgctcgcactgacgatcggcggtattttttcattgctgaccgctttgaacggacacgaatctgcacagatgctgtacgaataccagcccgaaaaattagccggtgcggaaggcctgtttgaaacaagatcccacgccccgctcgctatcggcggttttaccgacccgaatgaagaaaaagtaaaatgggcaatcgagattccatgggctttaagctttttggcagcgaaccgttttgacactgttgtaaaaggattaaatgcatttccgagagatgaatggccgccgcttttcattcacacgctgtttaatgcgatggtcggtgtaggcatgctgcttattctttattctattattggtgtggtctggagaaaggtgctcaagaaagaccgtttcccaacgtggcttttggtcattttcatgacagcaggcccttttagtctcatcggcattgaattcggctggattttcgcatgtacggggaggcagccttgggtcatctatcatttgctgaaaacatcggatgtcgtaacaacgactggttcgatcggagtgctcttcttgtttttcacatttgtttatgccgtgttaggcgctgctgtcgtctacgtgctgctgtactatttccgcaagcacccggttgacgaagatttaaatacagcggagtcgtaatggctccgcaaacaggaaaccaaatggaaggagatcgacaaatggagatttcaactgacgctctgatcgccatctcaattatctggggctttgtgtttatttacgccgtcatggcgacaatggattttggagcgggattttggtctatgatctatttaaacaaggagcatatgaaggccaccgatattgcgaatcgctttttgtccccgacttgggaggtcacaaatgtctttattgtggccatcgtcgtggcgcttttcagttttttccccggcgcgacatttgtgctcggcaccgttttattaattcccggaagcatgattttactgcttttagcgattcgaagcggatttctcgtgttttcaaatacagcaaaggagcggaaaacgctaagatatatttccggcatctccggctttatcattcctgctattttaattttggtgcttcctgtgacacacggagggtttatagaaaaaacggatggaatctataacttaaatatgtctaaaatcttttcaagccccaacgcctattcatttatcgggtttgcgattttaagcaccttatttttgtcctcgctgctgcttgcagatgtttcaaatgtggcagaggaacaggatgcgtaccgagcctacagaaaaagcgccctgattaccggcccgatttcactgttgtttgcagtatgcattatggtgacaatgcggaatgaagcaaactggctgtacagcggaatgatgaatgattttacttggattattgcatcgttcattacatttgtcattgctggaatcgccctttttctgcctaataagagctttgggcaaaacatcggaaaaccgcggcttgcacttgtcgcgattgggatacagtattttctcgcaagctacgcgtacgggcgggcgcatcttccgtatatgatttatcccgatgtgacagtcatgtcaggcttcacagagccagcaacgttcagagcgctgtttgcaacgtatatcgttgcatttatcattctatttccgggcttctttttcttctggaaaatgtttatgcgagataaacgctatatccgccaggaggaatagagggcaagccagccggctatactaatccagaacctttataaggaggggatggcatggagcagaaaattctatgtgaggtcaacaactgttcttattggggcaaaggtaacaaatgcaccgctgatgccatttatgttgtcagccatactggtgaaacggctgaaaacagccgggaaacagactgcaaaacgtttaagccgcatgatttgtaattaaaagaaagagctgcatcagccagctctttctttttgcatgttgagtgttctcagctttttagttatgaccccgtttgcaggtgaaaacaaaaaggcgcttgcataacatacacctgtcatggccgccatcgctcctgaaatcgaaacattaagccacgttgcgaagaaatagcccatgaccgccgacagcccgccaatcaacgcgctgagaatcagcatataaagaagccggtctgtcagcaaatgtgccgcagccggcggaacaatcagcatggccacaaccaatacggcacccaccgaatcaaaggaagcaacagtcgtcaaggacagcatgcccatttgcacgtaatgaatgagcaaaaccggtattcccaaggctaaagccatttgaggatcaaacgaagcgattttaaactccttatagcacacactgatcaacactacgtttaaaaccagaacagatgccagcatccaaaacgctttcggcccaatatcaaccccgaataccgtcaccgtattccacggcacaaaagcgatttctcccattaacgagtgctcaatatcgagatggacattcgctccatacacagaaagcaaaataaccccgattgcaaataaggatgtaaacacaactcctatggcagcatctgattgaacccccttgctatgaagaagctgaaccaagaaagccgttaacagaccggttgcggctgcgccaataaacatataaatcccatcgagacttcccgtcactagaaaagcgccgacaatgccaagcaacactgtatgactgattgcgtcggccagcatcgccatgcttctcagtacaagaaatgtgccgatcaatccgcagcttacaccgactaatacaccggtagctataatccatgcttcaaaactcattcgcgatctgtcccttctcggcatcatgagacacttttcgaagctcaggcatccgtccatacagctttaagagtgaataaagccgctctctcgtttctctcggtaaacggtccgggtcaaagtagtcctgatcggattctatattggcaagttccatttcatgcatgagatacacttcatacatccgctgcttcaaagctgtgtgatagcctttttcaatccctttgcttgtgatttgccaaatcccattttcgatacgctcaatgcacctctcttgttccaagtcatttaatgccttaaggcataatgaaggggataggcgtcttttctttcttacactttcaacagttacacaaagatttttcttttcatactgttcataaatcgccaaaagcacttgctccctgcttgttctgcgccgcagcctcatcagccttatggctttagcagccaatccccgcttaggcgcgcaaatcattgaaaaaagaaagagcagcgttgcagataagatcattaatggccctgtcgccattcccttcatcgtggtgctaagcagggttccggccactccgctgaccccgcctgtaatcccggcaatgatgatcatcccggttaatcgttcggtccaatatctcgcggttatggcaggtgtaatcagcatagccgccattaatatcacaccaacagtctgaagcccaatgacgacagcacagacaatcagacaagccaaaagcccgtttaaaaaacgcaccgggattcctaatccctttgcaaacgcgagatcaaaagtaatcaatgtaaattccttaaagaaaacaatacataggagcagcagagcagcggatatccctgcaataaggatgatatcctgcctgaccaatgaagcagcctggccgaataaaaaagaatcaagcccgctttggcttcccgccccctgttgctgaatatatgtcagcagaatgatcccgacgccaaaaaacacagaaagaacaatcccgatcgccgagtcctcctttgtttttgaaagccgaggaatcagctgaatacaaaacgttccgagcagtccggcgagcgctgcccccagcaaaaagaaaggcagtgatttttgcccggtgaacagaaaagcgagacacactcccggcagagctgaatgggccatcgcatcgccgattaaactttgctttctcagcagcacaaagctgcccaaaacaccgcttgccgtcccgagcaaaagcgtaccggccagcacccactgtgtattcggatgctgaagctgcagccacaaactttcaaacattgcgctcactccttatgtccttctgccagcactttatcttttaaaaacgtaagccttcctccatatgttttttgcaggttttcgatcgtaaaaacgttttccgccggtccgaaagcgattttccttaaatgaagcagtaagatccaatcgaaataatcctcggcggtctgcagatcatgatggacgacaagcacggtttttcctttttctttgagctctgccaacagcgtcataatcgcgcgctccgtcgctgcatcaacacctgcaaacggttcatccataaaataaatgtcagcgttctggcagagtgcccgggcaagaaacacccgctgctgctgtccgcctgacagctggctgatttgcctcttcgcataatcatgcatcccgacttttgttaatgcggccttcgccatctccacatccgctttctttggcctctttaataaaccgattctcccgtatcttcccattaggacgacatcgagcgggcttgtggggaaatcccagtcaaccgagccgcgctgcggaacatatccgattctggtccgctgatccttatagtctttgccgtaaatagagatgtctccggaagctctgggcacaagaccgagaatcgttttgatcaaggttgattttcccgcgccgtttgggccgataatgccaataagttttccttcaggcacctgcagcgaaatgtcctgcagtacaggctttttatgataagcaaccgtcacattatcaagctcaacagggaacatatcctccacctcttttctttatttaagcgctttagtaatcgtgttgatattgtgacggaacattccttcgtatgtgccttcttttgtgcccttttcacccatggcatccgaataaagctgaccgccgattgtgactgtatggcctttttctttagcgccttccaccactgcattgattgatttttcagatacactgctttctacgaacacagcttttatttgtttttctgtcagaagatcaaccagctcctgaacatcccttaatccatagtccgaatctgtgctgagtccctgcaggccttttaccttaaatccatactcattcccaaagtacgcaaacgcatcatgagcagtcacaagcacacggcttttctccggaatatgtgcgatctccttacgcgaccacttatctaaatattgcaaatcttctttgtactctttggcatttttccgaaaggcatctgcgtgctgaggcattgctttgctgaattgcgcttcaatttcatccaccgcatagatccataacggaatgctgaaccagacgtggggatcaaacgtcttgccttcccccgcgggaataagcttatttttcggaatggcctcagctactgccgccgattgtttttgttcgccgattttttggaggacatcctccattttcccttccaaatgcaacccgctgtacagaacaacatcggcagacattaattttttcgtgtcaccttgggaagctttgtaaaggtgcggatcaacccccggtcccattaaagaggtgacttttacatgcttacctccgatgttttctgctgcatcggcaatttgagatgttgtcgctgtcacttgtaattgctgatcagcgctttttccggctgaatccgttccgcatcccgttaaagcaaaggtcgcaaaaagtactgctgccatcagcccttgtctcatatttctcctcctctttgccatcaatgtccgattgttttatcttatgttgtcagttcttagacatgtgacattaaattagccaaaagcatgttttatttacacaggacaaaaagtttcccttatgcaaaattatcgcgtttggccatttttgtcaagctgatttacataaaaaaaccggctgggtcagcagccggtccaaacgagaagggatgtattcaacgaacacttttactgtaacagcacagtgtcatttattcaaaatagcaaaatgcttttttcttaaccatgctgtgtgaaaacatccattttggtcacatattttcgcataatatcttggtttacctcaacccctaaaccaggctgttttgacacagaaataaatccattatcaatacgaatatcaggagttacaatatcttcatcccaatagcgtgaggatgaagatatatcgccaggtattgtgaattgaggcagtgaagcaagcgccacgttctgcgctcttgatatgcctgtttccagcattcctccgcaccaaacctgcatatgatgctctttgcataaatcatgaatttttaaggcttctgttaagccgccgacacgagaaggttttatattaataattttgcagcttcctagctcaatcgcccgtctcgcatcatcaactgaacaaatgctctcatcaaggcaaatggccgttttcaaatgtttctgcaagtggcggtggtcaacgatatcgtcagcttggagcggctgctcaatcatcattaaatgatagtcatcaagctcctttaaacggctgatatccttcagttcgtaagaggaattggcatcggccataagcgggatgtttgggaatcggctgcggatggccttgaccaattccacatcctgcccaggctgaattttaatttttattctttgataaccttctttttgatagctctcaatttccttcagcatatcgtcaagaggcgccaggccgactaccaccccggcagggactttatctcttgttccgcccaatgcctcagcaagggatacgcccttctttttggcataaatatcccatacagccgattcaagtcccgcttttgccatccggtttcctttataccgcgccaggctgtccggcacttctgaagggtgattgaattcacggccgacgacatttgggataaaaaaatcttttagcatatgcaaacatgttccaatggtttcctcggtgtaccaaggcgaagagaaagcggaaacttctccccagcctgtgacacctgatgtatcaatggcttccacgatcagaaatttacgctcttgaagcgtttcgatactgtttttaaacggtttctttaagttcatgctcaaatggtaaagcgtgattttttctatttcgatcatagcagttctcctttacgcgcatccttcagctgatttcgcaagagcttattagacgcattgcgcggcaggcggtcaagcacaaagaattttgccggaattttatacttcgccaagcgttctttgcagtagtcagtcaattctcctgcgctcacaggcttgtgaaggacaagataggcgtgaggcactttcccccattttttgtcctcagcccctgaaaccccggcttcggccacagcggggtgtgaaagcagtactgactccacttcggccggataaatgttttctccgccggatatgatcagatctgaacgtctgtctaatacatataaaaagccttcattgtccaaataaccaagatcacctgttttcagccagccattttgaaaggaggcttcgtttgcgctctcccggttaaaatagcttttcatgacattcgggcctttgaccatgatttcaccgtgttcatacggttcacatacctgtccgtcccgctctattttgatttcacatgaaaacagcggtttccccgcagatccgagcttttccatactgaattccggcgacagggtaacaatttgtgagcatgtttctgtcattccatatgactgaaagacagggaatcctttctcacggcattcctcaagcaatggcagaggtgcagggccgccgccgagaagaatgcatctgatggattcagggcagcggcttgtttcttccaaaagactggccagcatagtctgcaccgcagatatcattgtcacttcatgcctgttgatagaattcagcacatcgcttacggaaaaacgctggtgaagcacgacagtcattccatagatcacagatttaaataatgcggacaatccgctgatatgaaagagcggcaatgcgataagccagcggtcttgttctgttatacccaaattaagcgcggacgacaccgcactgaaatagtggtttccgaacgtttgctgaactcccttgggctttcctgtcgtacccgacgtatacatcagcgttgccgttgcatccatttgcatataagcctcgatctcaatttcctctgctgcttctttcatcagttcatccacatcaatcgtttgaacgatgtgttgatattctttcttctcaaagcttgaatctgtcaataaaaagccggatcccgaatcctccagctgaaacagcctttcatgtgttgacagcttcgtattcaaaagcaccgccttaacaccaagcaaaaaacaagcgtgaacagcgtataccatttctgcacggttttggagcaaaatagctgcagtatcccctttccgaaccgaatgagcggcaagctgttccgccattcgtttagacgcggcaaacaattctgcaaatgtcacggtttggtcttcatagatgagagcgattctctcaggtgtcagctgtgcccgctgcatgagccagttgggctgttctgtcagcatgtcatcatctccgaggtaaaatgtctgtattgaaaagaaaacagcttggaccgcaaagtctcaagctgttggtttactaggtattgctgatcacggaaaacgagggaactgtccgaaatcaggtttgcgtttttccttaaaggaatcacggccttcttttgcttcatctgttgtgtagtaaagaagggtagcatcccctgcaaactgctgaattccagcaagtccgtctgtgtccgcgttaaacgcagctttaagaaagcgcagtgcggtcgggcttttttcaagcatttcttcacaccatttaatcgtttcttcttcaagctgttccaaaggaacgactgtgttgacaagacccatgtccagtgcttcctgtgcgttgtactgacggcataggtaccagatttcacgtgcttttttatgtcctacaattcgagccaggtagccagaaccgtaacctgcatcgaagcttcccactttagggcctgtttgtccaaaaattgcgttgtccgcagcaattgtcaagtcacatacgatgtgaagcacatggcctccgccgatcgcatatccggacaccatcgcaacaaccggtttcgggatgacgcggattaaacgctgaagatccaatacgttaagacgcgggatctggtcgtctcctacatatccaccgtggccgcgcactttttggtctccgccagaacaaaatgccttgtcccctgcaccggcaagcacgataaccccaacgttttggtcgtctcttgcgtcagcaaacgcatcaatcatttcagcaaccgttttaggggtaaacgcattatgtacctcaggtcggttgattgttatttttgcaatgccattatacgtttcatacaatatctcatcgtatgtccgttttgttttccattcagccatatgatgacctccttttattctctatgtgaatgagtcagatgcttgtcaaaaactcactcactattttaccaaacaatcgcggctgttccacatggaccgtatgtcctgcttttggaacaatctctattctactagaaggaagcatcttatgcacctcttgattgatggcgcaaaatttttcgtcccactccccgcagataagaagcacaggaacatctatttcctctacacggctccacaaggaaggctgtgaaccggtgcccatgccggttaaactgttcgcaagcccaatcttattgttccgcagacggcccgatcgtatcctgtgccgaatatcttcagccagcctctgctgagatgaaaacaaagggatattctcccaatacgcaacaaacgctttgagcccgtctcgtaaaataaaatcagcaagcttccggtcccgcatgattcgttcccgccgttccccaagtgttttgagccccggcgtcgtgctttcaagcacaagtgccgatacccgctcgggatatgtcatcgcgaaagagtaagcaagccttcctcccatagaatacccaatcaatttcactttgtgaagttttaattgatcaaaaatctcggcaaggtcagaaacttgccggcttgtgctgtatcttttcccattcagcggggcatcggtttccccatgccctaaacaatcaattttgatcaaacgggaatcaggcagcatttcatcaagaaaagtccatgattgtttgctgccggtaaacccgtgcagacagacgacggcttcggaagcattcggtccctcgtctgccactgcatatcggacaccatctgataccgttatgtttacagttcccattgttttttcacttcccgcacagcctcattcagcatatcgcgatgaagctggactcttgattggcgatccgttttgatttcaatcaaatggagtccgggcttgtctgcctgcggcgcgtaagctgttttgaattcatcccaagaagccgggcatgaatacgttccgccgtaaagtgcagcggcatgcttgaaatcgagccctgtcggtgtgccgaacaaatcttcaaagtgtgtcttctcagaagcctgcggcaaaaaggagaaaatccctcccccgtcattattgacaagaatcacagtaagtggaatacccagctttttggccgccagcaagccgtttaaatcgtgataaaaagataaatctccaatcacaagggtaacaggcgcttttgttccttcacatacccccatggcagaggagacgacaccgtctatcccgtttgctccccggtttgaataaatccggaaagggcggtcctgcttttcgaaaaacgtatcaacatccctgatcggcatgctgtttcccacaaacagcgagctgttttcaggcacaagatgctgaaggattcgatagagattgccttcaaacgaaacatcttcactgctgattgtttgcagatgctcgcggaaccgcccattgacaaactgccacttttccagccactctgaggatctggcagcagcagtaaggcctcccatgatctcctcagcaaaaacagacgcattacaatgaatcatatgcgcgcttgcctgtgtcgggtctctccaccctccatcctcgtcaatcactatttgctgaatcgcaggatcatccttaagccataagaaaaccggttttgaaacaggcatcggtccaaaccgaatgacaacatcaggacgaagtttccgcttcagctcatcatcttttaaaaacgaatcatacgcatcaataacagtgcttttatcatgaacaccattccgcagattagacagcggatccgctaaaattggatactgaagcgcttttgacagcgcaataatgttttccttatccgcatcactatggagctccccgcagacgatcattcctttttcagcctctgcgagcatctcagccacatcagacagggactctcggtcaacagactgcgtacccgttttcacagacacatgacggcctgttctcattcttccaaacggctcatctgaaagatccggcatcagcggttcgcgcagcggcacattcacatggacaggccccatcgggcgcttttgtgcttctccggcagcgcggcttgccagcgttcggatgtatctcagcatttgcggagactcttcaggaagagcagagtctgtgaaaaacttaacaaagttaccgaataagaagtgctgattaatagcctgcggtgcgcctacttcgcgcagctcatgaggccgatcagcagttaacacaataataggcacccttgaataatgggcttcaaccacagccggataaaagttggccgcggctgttccagatgtacagatcaatagtacgggacgctgcttcgcttttgccaaacctaaggcaaaaaacccggcagatctttcatcaatttggacatggacgctgatatcgggatgcgcagcacaaagaacagccagcggtgtagatcttgagcccggacaaacgacggcgtccgtaattccggaaagggcgaattcatcaataaaacttccgatgtaatgagtaatcgggttgactgtcaacgcctctcacctcctaatgcagagatcatcggcttcaatttaatctgtgtttcttcatattccgagattggttccgagtcttccacaataccgcacccggcaaacagccttgcagtgcttccttcgatcagccctgaacgaatggctaccgcgaattccccgttatcctggctgtcaatccagccgataggggcagcataccagccgcgagacatcggttcaatctccctgatcacgtcaacagctttttcctgaggtgctcccccgagcgccggagtgggatgcagcttctcaattaagtcaaaaattgaagcagactcgcgcagctgtccgacaatcggcgtaaacaggtgctgaacgctttttgttttgtacaaaacaggtccatcaggcttttcaacctctgaacagcttgatacaaaagcattatgaatcatacctaccacaatatcatgctcaagcaggtttttctcatcgtttaataattcaaggcctatccggcggtcgtcttcttcattcacgcctcgtttaatggagcctgccagacaggaagacatgacagtgccgccgtctcttttgatcagtctttccggagacgcgccgacaaaggttttgccttcttgttcaattgcaaaaacatagcttgtctgctgatcgtccagaagcgttttaagcaccggttcaatttggattggaccgtcaaacgtgagcagcagctctcgggcaagaacaaccttatcatattgtttctctttaatttggcttgtggccgtttcgattgctttcagccaatcatccttatccagctcttcggctgctgcaatcacagcctgatcttcttgcttgaaatcgggaaccataaattccgccgcaaaagcttttaagccttctaaaacagcttctgcgtcttctcctccgcttacccatctgttaactgttaagaacgggccttcagcagtcatcgtcagcataagcgcaggcacaaagaaatccccttccgagaaatggtcccattgtgaacctctttcttcgcaagggtcaaaagaaaatcctccgaataacacaggtcccactgcagaatgctgcagcttttcttcttcataaatatgaaaagccgtctttttaaagcgctcccattgttcaaaaacctcacgataccgctcgctgtttttttgatttgtctggaaaaccgcttctttgccaagaccgactattgtcaattcactttcaggatctgaccaaaaaaatcgattgcctgtatatttttttgctccgtaattgaaaaatgatagagggtcaagagactcgatttgtctcgaatagcttattaagacagcatggttgacttctttggctttatgtaatgcatgtagaacttcctttcggaacgtacgctgcaccgttgtcaccatgagacattcctccataatccttaaaatgcttttaataccatacacctgtgtctcctttgtgtcaaacacagatcatgcagtccaaatggcctgccttacctattataaacctaatttcagaaatgaaaaagaaacaaagcttaaatttctttctccactgatagcaaaggttgtatccgcttaccataaaaggaaaacctcctatattcctccacccgccatttatgaaagttctcaggcgatctgttcatactaaaggtatgcatcacagagaaacgaggcgatcacattgcttacgaaagaacagcttcagcatttaaaaaatgaactggaacaaacgaaaaaagatatcttaaaccgtttcaaagacaatgaccattttcagcttaactcagcctttccttatgattcgtggggtgagctttcggcatacgacaaccatcccggcgatcaggcgacagaactttacgagcgtgagaaagacatcgctctagacttgcatgagcgagagcaccttcgggacattgagcattcattgaaggcgatagaaaacggtacgtatggcatttgtgaagtcagcggaaaggaaatccctttcgaacgacttgaagcgcttccgactgccacaaccctcgcggagtattcgtcacaggacgtggtttccaaagaccgtccgattgaagaagaaacaccattcgggcaatttgaatttgatgatgatgaagaaatcagagcgccatatgacagtgaggattcctatcaggatgtcgaaaaatatggtaactcacaaacgccgcaggatatggaaaaccctccgctcagctatgatgatatgacgatgaataccgaagagaatatcggcaatacggagtcttacgaaaatttcatcgctacagatatcactggaaaagaaattaccgtttatcaaagcagagcccatgagcgctatgaagaagaacttgacgaagagggaatcatgaccacattcggcgatctccacgctgattgaacccccaattattgggggttcttttccgttttcagcatatcgtaaatcagcttcagataatccttttgcaggccgatgtcataccgctcgccctctagcaatttcccgtatacggtacatgccccgagcgaagcttttatcgcatccgttacctgcacttctcctccgctatcagcttctaatgcctccagctcattaaaaatatccggtgtgaaaatataacgccctgctgcggcaaaatgagacggagggttttgtttaggcttttccacaatatcctgtatgcgataaagccctttttcaacaggctccccttttatcaccccgtaatgatgtaaatcctccgtttttgtttcttttaagccgatcacactggactgatatttcgtatacgcttcaatcagctgccccaaagccggctgattggcggaaaaaatcagatcatctggcaaaacgacggcaaaaggctctccgcctgcaaattgctttccgaaagaaatggcgtcgccaagaccctttgcataaggctgccgcacatagtgaatccgtatatccggaatgggatgctctctaagtaaatgcagtttattcttagaggccaaaaaagcctcaagtgccaaagaggaatcaaaatagtcgacaatcagatttttatggctcgatacaaccatcaaaatgtcctcaatgcctgactcctttaattcttcaacaagataatgaatcacaggcttagatcctaccggaaacatttctttcggaatcaccttcgtcaccggcagatttctcgtgccgaatccgcctgcaggaataatcgctttttttatcatggtattttcccctcagctcatgtttattacatgatattccaagagcgcatcccgatgtttgtacatctgaaattaggcggaagcaactgggcagaaagcggaatcacgaaccagcccttttttaataggatattgatatatgaccagtaatcttgtaaaggagctcaggtgatgaaaatttgtgtggttggcgccgggtatgtcggtttaaccctatcagcggcactggcatccatcggacatgacatgatatgcacagacaaagacgtcaaaaaaatcgggcagctgaaaaaaggagtcattcccttttacgagcctgggctttcagatgcaatacttcgttgcggcaatctctcgttttcttctgaagtgaaatcgagcatggaggaatgtcccgttatttttatcgcagtcggaactccgccgcgttcggacggatcagctgatacgaaagccctgcagtccgtcatcggtgatttaagcgaggcgatccgatcgtataaaaccattattacgaaaagcactgttccgcccgggacaaatgaaaacatagcaaaacagctgattgcctccggagtgtctaaaaacctctttaatatcgtatccaatccggagtttctgcgggaaggcaatgccttatatgacatgctgcatcctgacaaaacagtcatcggtgttcaggaagaagatcacgtatcggcagccatcgtcaaatccatttacaaacacattgataccccttttatcgttacaagcttagcgggagcagagctgatcaaatatgccaacaatttctttttagcggccaaaatttcgtttattaacgaaatggcccgcatatgtgaagcctatcaatcagatatctcagatatttcccgcgctatcggtctagacccaaggatcgggaagcactttttgcaggcaggcatcggatacggaggctcttgttttccaaaggatctgcaggcgctgcaatttgctgcccaggaaaaaaacacggagaccttcctgctccgggccgtgcagcacattaatgacacccagctcggcctgtatatcaaaaaaatacagtcattcttcgaaacacttcaaggcaagaaagcggctgtactcggcatttccttcaaaccgaatactgatgacatcaggaattctcaggctgtcagactgatggaaaggctggcggagctgggatgtgatgttcatgcatatgatcctgaagctgtacttccagaacatttgcggaagcatgtaactcagcattctcaagcttttgatgcgatcgaagaaagcgactttttatttttggcgacagaatggcccgagtttttagcgtttgattggaaaaaggctgcagatatcatgaaagggcgtcttgtgatagacgggcgcaacgtactgaaaaaagaactgatcgagacttgcggcctgatctgtacgggagttggccgtccatgaaaatactcgtcacaggagcagctggctttatcggctcccacctctgcgaagaattactaaaagataagaaacataacgttatcggaatcgatgactttatcggtcctactccattttccttgaaattaaaaaaccttaaaaacctgctgccggaaaagcgatttacgttcataaaggaaaatctgctgacagccgatcttgctcccttactggaaggagtggacgtcatctttcatttggcggccataccgggtgtccgctcaagctggggcaatcattttcacccatatgccgcacataatatccaggcgctccaaaggctcctcgaggcgtgccgggaacattctattcaaacgttcgtctttgcatccacctcttccgtctatggcgaaaaacaaggaaaagtcagcgaaaacacgtcgctttctcctttatctccgtacggggtaacaaagcttacgggagaaaagctttgccatgtgtatcaacagagctttggtattccaattgtgattctccgtttttttaccgtatacgggccaagacagcggccggatatggcttttcaccggctcattaagcagcaccttcagcaaaagccgcttaccattttcggtgatgggcagcagtcaagagatttcacttatatcggcgactgtgtcaaaggcatcaccgctgttcttgggaaaccccaccttattggtgaaacagtaaatatcggcggcgcagagcgtgcctcagtcttaaaggttgtctccctcattgaggatatttccggtagaaaagcaacactgcacttttcggacaaaatagcaggggaaccgagcaacacgtgggcggatatttcaaaagcaaaacagctcttgcattatgatcccgccacatccttaaaggatggcttgaccaacgaaatcgcctatttatcgtcgctgtatcagggggaataaaaatgaagcttgcctttatctgtacagaaaagctgccggcgcccgcagtacgcggcggcgctattcaaatgatgattgacggtgtcacgccctatttcagcagcaggtacaacctgaccattttttcaatagaagatccatcgctcccaaaaagagaaacaaaagacggcgtacattatatccatctgccaaaagaacattaccgcgaggcggtagccgaagagctgcgagcctcttcctttgacctcattcatgtgttcaacaggcctttaaatgtctctttatataaaaaagcctcaccaaacagcaagatcgttctgagcctgcataacgaaatgttttctgaaaaaaagatgaccttcgcgcaaggaaaagaagtactcgacaatgtctccatgatcacaacagtgagcgaatttattaaacaaaccgtcattgaacgtttccctgaagccgaggacatcacaaaagttgtgtattccggcgttgatttaaactcttatccgcccgtatggacgatgaaaggctcggctgtcagaaaaacataccggaaaaaatacggtattgaagataaaaaagttattttattcgccggccgcttaagcccgataaaaggacctcaccttctcattcacagcatgagaaggattttgcagcagcaccctgatgctgtactggtcatagcgggcgggaaatggttcagcgatgacagcgaaaaccaatatgtaacctatctgcgcacgctggcgctgccatacagagaccacataatctttacaaaattcattcccgcagacgacatcccaaacctttttctgatggcagatgtatttgtgtgcagctctcagtggaacgaacccctcgcccgtgtgaattatgaagcaatggcggccggcacgcccttaattaccacaaatcggggcggaaacggagaagtcgtaaaagacgaagtcaccggccttgtcatcgacagctacaacaaaccttcttcatttgcaaaagcaattgacagagcctttacagatcaagaattaatgaacaaaatgacaaaaagcgcccgaaagcatgtagaagctttatttacctttacccatgctgccaaaaggctcaatactgtttaccaatccgttctgaccccgaaaaacaaacaatttccgccgccttttctgacgcaaaattttgatttatcatctatcaatcagctttttgtgaaagcaaaaacataaaacctacagctcgtgttgcaaaacgggctgtttttttgctgcagaaaacataaaaaaaggcataaatgtgactttatgccttgcgctttacggtttgagaaaaccatggagctggtttagattcacttggaagaatgatgatttccactttagcttcttccgctaagtctggttcttcatcttcatcctcttcttcatatggggacactgagcgtttcgaatcacgctcctcctcaggctctagaatggtttcgaatttcgtttcttcttcatcatcgacgattttgtgatctgtttccttttccttcgtttcttcttgatattctttcggtgcattgatgtgagggagctctcgaatgctgcccacatctaaatgcttctcctcttcttccttctcagctgacattgagtcatgagcctgccaccccatcggcccaggcggtgtaaatacgaattggtcgagatccagtttagaaatagaggctttttgtctcgatgacctcatgtcaattcgcctcccgatacgcttttatctttttatacagttccggcagtttatccaaaaacgaatctttagattcttcaacagaaatcatgttttgcagcgcccagttatatttctcatctgaccacgttttcttttgcttcaaataatatttgtgcccgattgcacagaacaaatgcggaaacgcgagatcaatccaaagtacctcgtactgtttttctgtgagcggatacactgcgtcgtaggccgcaagcagtgcgaccatgaaatcagtatcccatacagaaagcttaaccatcactttattcagcagaatacgaaggtctcttgacggcaaatcgtaggtaatcgagtgaagctcctttaaaaaaggctccccttcgatctctgtcaaacgtgccaatgtaaaatcttgaaaacagaatccgccatgctcgagcgtttcttttgtccaggtttcgtattctgagtcatcaagcgcctgaagagcttcttttcctcttgccagcattttatcagcatgttttaagaaagtttgcgaaaatacgtcatcaggataggatgccgcgatctgcatattcccttcaagttcctgcagcttccatcggtacaatttatgccattttcccagcctgcttctcttcttgctttcatctgtgcaaacatatccttttgaggcatgatgaaaatggccggcaaatgacatgacttttttcatttgctctgcatcatagtaaatcatttcttttcctgtcactttgtcatataagctgtaagaaacctgatccgtgcccaagcagctcccgccattttttgtttgatgaatcggcgctatcggcagccctttctcttgtaaatgagcgtgtgcctgagtgataaaaagcatccgctccggtttcatttgcgcttcttttagcagctttgggccatgatcagtttcgacttcccagattttgcgcccgcttttgttcgatttcagcgccacatggtcgatatgaaacggataatagctgagaatttcggacacaatctgttcttcatgctctttttggtacactctgttcaccccttctatctgttcttttcatagacgctgagcagattttcagccaccctctgccagccaaaattgctttctgcctcacggcggctgtatttcccaagccgttcccgcttttcagagctgctcagcaaatcattgatacgttcggcatattgtttaggattttcaaagtcatgaatgatgtagccgtttttcccttcctctatgacctctggattgcctccccgattgcttgtgataattggaagtcccgcagccatcgcttcataatgcacccttgctaaaggctcctgccattgcgaagagcatacaaatacatctgacatggtataaaggcgcggaatgtcctttggcttcacaaattgaataaatgtgacatgatccttttgcatcgcaccaagggtatgaagatgtttgacatagttatttaattcattatctccgaaccattttgacccgataaacaccatcatgacatcggggtgctcctcaatgatgtccggcaaagcctgcaataatatgtgcgggcctttgactttgctaagccggccgacaaacaagacgatttttttgccgtgaagccccagctcgcttcgcatctcttcgcgagctcgctgcccttcattcgtccagcgagggtggtacgtttttaaatccacaccagaatacaccgtttttgtttttgatcgtgctgacggaaaacggcttgtgatcgtctgtccgatataatcgctgaccgtaacaatctgcgctacggagtcgatgcaaatctcgccttccgcctggctgattttatcgtaagcgaacatttcattgtgaacgcttaaaataaaaacagcatccggcgcctgtttcttcaatttcggaacccagcttgggcgattacaaacatgcacaagatcaaaacggctctttttcagctctgctccaacggcttcttcataacggtcttcatccaaatgcacataatggacaccgtctaccttctctctatcagcgagattcggatctttaatagaaaacacagtcacctcatgtttttttgcaattaaaggggcaaccgcttcgaggtagatttgaatggcgcctcctcgaaccgatgggacaggaagcttctctgtggcgatcagtgctattttcatacatagcctccattcctgcatgatttttaactagttagaatcatgatacggctgaacaaccaacttgtgcggaatgggactgccctaaaaacaaaacgggtaaacaaccagattcatctattaaatatagtcaaataactcaatcattttttccttttgattcataaggtaggagtaaaacaggtaaggatgtgtcctttaatggcagaaaaccatgaagtcattgaggaggggaattcatcagagcttcctttatcagcagaagatgcaaaaaaattaacggagctggctgaaaatgtgcttcaaggatgggatgtgcaggctgaaaaaatagacgtcattcagggaaaccagatggcgcttgtctggaaggtccacacagactccggcgcggtttgtctaaaacgaatacacaggccagaaaagaaagcgttgttttccattttcgcgcaggactatttagcaaaaaaaggcatgaatgttcctggcatactcccaaacaaaaaaggcagcctatattctaagcacggctcatttctatttgtcgtatatgactggatcgaaggaagaccgtttgagctgactgtaaagcaggacttggagtttatcatgaaaggccttgctgattttcatacagcttccgtcggatatcagccgccaaatggcgttcccatatttaccaaattaggtcgctggccgaatcactacacgaaacgatgcaaacagatggaaacgtggaagctgatggcggaggcggaaaaagaagatcctttctcacagctttatcttcaggagatagatggctttattgaagacgggctgcgcatcaaagaccggcttttgcaatcgacctatgttccatggactgaacagctgaaaaaaagccctaacctttgccaccaggattacggaaccgggaatacactcttaggagaaaatgaacagatttgggtcatcgacttagataccgtatcatttgatctgcctattcgcgatttgcgcaaaatgattattccgcttttggatacgacgggtgtttgggatgacgaaacatttcatgtcatgctgaacgcatacgaatccagagccccattaactgaagaacaaaaacaagtcatgtttattgatatgctgtttccttacgagctttacgatgtcattcgcgaaaaatacgtccgcaagtctgctttaccgaaggaagaattagaatcagcttttgaatatgaacgcattaaagcaaacgcattgcggcagcttatttaagaccatcatttcccccgcatatcgggggtttgatctttataagataaagggtaattaaatacatgcggaggttgcaaatatgaaaaagattgtcggcgctttagccgtttttgtgattacatatgcgctgttttcagccgcaggctacctgtttcctgtggaccaagaatggtacaattcattgaaaaaaccggactggacgccaagcggaactgcgatcggcatcatttgggccatcctgtttgccctgatctccctttcagcagccattgtatatgctgcgttttcatttaaaggtgcgaaaagcttttggtttacacttttgataaattacgtgctcaatcaagccttcagctatttccagtttacgcaaaaaaatctgctggctgcatcgcttgactgcctgcttgtcgccatcacagcaatcgtattactgatcattgccaaaaaatacagcagagccgcaagctatcttcttttgccttattttttatggagtgcatttgcgacgttcttatcctttacaatcaattcaatggatctgtgaacaaaaaaagccgcttatacagcggctttttcacatcatcggcttgatgccccaaatgtccttcgcatattcccggatcgtgcggtcgctggagaaatatcctgaatgagcaatgtttacaatcgaacgctcagaccatttccttcgctctcgataatcagcttgaattcgctcctgcgcatctgcatatgagctgaaatccttcagcacaaaatactcatcattatgcggaagcagcgagtcaaagatcgattcaaattcatctgcttctccttcaaaaaaaccattgatcagctgatccgctacctgcctgattcttctgtcatgctgataatattccctcgatctatagccaccattttcctgatacgatagaacctcatccgcctttaagccgaacgtgtaaatacagtcagggcccacccgctcaaagatctcgatatttgcgccgtcatgcgtgccgatcgtcaaagccccgttcatcataaacttcatattccctgtaccagacgcttccttgcttgcagttgaaatttgctcacttacgtctgatgccggaaaaattcgctcagccatagaaactctataattttctaaaaaaacaactttgatcagctgtttgactgccggatcataattgactttttctgcgacagaatggatcagcttaatgattttcttggcataataatagcttggtgaagcctttgccccgaaaataaaggtttgcgggtagattgaaaacccggcgtcctccttgaggcggttatacaaatacataatgtgaagaacattcagcagctgccgtttatatgcatgaagccgtttcacctgtacgtcgaatatgctgtcagggttcacaaccaccccggccgtgcaaaaaatcaaatcggcaagctcttgttttttcttgcttttgttgttttgaaactgttcaataaatgcaggatcagtggcgtacggttctaaacggatcagtgattccggctgtttgacccattcatcgccgatcgcctctgtaatgatggcagacaagcctggattcgcttttaacagccagcgcctgtgggcaattccattcgtcttattgttaaaacgattcggaaacagcaagtgaaagtcgcgcatctccctttccattaatatatcggaatgtatttttgcaacgccatttacactgtaactgcctactatggccagatgagccattttgacaacaccatgcgctgtaatcgccatgtcctctatccttttccagtctcccggatacttttcccaaactgcgcggcaaaacctctcattgatctcttcaataatcatgtacattcgcgggagcagcggcttaaacaaatgaatcggccatttctcgagcgcttctgacaatgttgtatgatttgtataagaaatcgtatgtacagtgatatgccaagcttcttcccagctcatgttctcttcatcgagcaaaatccgcatcagctcaggcaccgcaagcgcagggtgagtgtcattaatatgaatgctcacttttttatgcaggccggataaagatttatgtgtttttcggtaattgttcacaatgctttttaagcttgcgcatactaaaaaatactgctgcttcagccgtaaaattttcccctcatcatgggtgtcatcgggatataagaattcagaaaccgcctctgtttcccgcttataagacaaaatattaccgccgtgataatgcgcatagggctcggcgttccagagccttaacgtgttgacagtgcccgtttcatagccgatgaccgggatatcataaggaacagcggtaacaattgtcgcttgttcgtggcgaaaatgcaggcgcccgcttttttctgtcatatggacttcgccccaaaacggcacgtccactgcttgatccgcattccttacttcccatacgttcccgtttttcagccattgctcaggcagctccacctgatgcccgtctacaattttttgctcaaacaaaccatgcttataacgtatgcccatgccgtgcccaggcaggttcaacgaagcaagcgaatctaaaaagcaagcggccaagcgcccaagtccgccattgccgagacctgcatcgttctctatctgaaggatctcctctaaattgatgccgatttcctttaaaccagcttctacaacatcacgaacaccaagattcattaagttttgctcaaggagctgaccgagcagaaattcgattgataaataatatgtctgcttcccggaatttgatctgcttttttcattcgtttcgatccaatcagcgctgatatactctctgaccatattgcccaacgttttatattgatccagcttggcagaatctttaaagctttttccgcacgtcatttccagacgctttaaaaataagtctgcaaagcgttctttactcgagaacatcccgtccactccttgtcacctgctcgaaaatacgctgatactctttagccgacttcccccagctgtaatctgcattcatagcggtcttcacgatgctcttccatacatcctgttggcaataaaacgacagcgccctttctatcgtaaatttcagatcatgcgcattaaaggcggaaaacgtaaagccattgcccgttccctcttcctcctgataggcacggacagtgtcgtaaagaccgcccgtttccctgacaatcggaatggcgccatattgaagagcaatgagctgccccaaaccgcacggctcaaatttcgacggcatcaaaaacatatcagagcccgcataaatttgatgggctagcggctcatcaaacccgatataagcccggcacttctcatgaaaagcaaattctgcataccggaaataatcttcaaattcacgttctcctgtgcctagcacaaccagctgtatgtcttgctcctcaagaagttcgtgcataattctgcggacaagatcaagccccttttgtttagtgagccttgtcaccatactgatcagcggaatatcgtttttctctggaagccccatccgctgctgaagcttcgttttgttttccagcttgcatgcaagatcccctgaatcgtattgcgcctctatataagggtcgcttttcggctgatagaacgtatcatcaatgccatttaatatgccggttacatcatcttccctatattgcaaaacctgttccaactgctcaccataatacggcgtcatgatttcatttctgtaagtggggctcacagttgtcacatgatcagccgcaatgatgcccgctttcataaaattaacaaatccgttgcattctaacctttcataatgaaaatgatccatctcaagacccagcaagtcatgtgtgacatcaggagggaatatgccttgaaactgcaggttgtggatcgtgagcacgcttttcatccgttcataaaaaggatgttttctgtactcctctttcagcaaataattgaccatcgctgtatgccaatcgtgagtatgaacaatatcggctggaacattcacaactttggcagcctccagcacagctcttgaaaaaaaggcaaaccgctcaccgtcatcataatgcccgtacaacgaatccctgttgaaatagtactcattgtcgatgaagtaataattcacatcgtcttcggccatatgttcaattccgcaatattgctgacgccagccgacagctaccgtacactcagccttttttttcatacgctttttccacggttcaggtatttggctgtacttcggcagcatcacatatacttcattgcctaatcgcgcaagcgccttcggaagagcgcctgctacatcggcaagacctcctgatttcacaaatggggtgcattcagacacagcaaataatatcttcaagaattcatcagctctccttgcaccaaaccttttcttaatacaagcggctgctcagctgttcctacagcttccgtcgccttgccgattttaacgtccttatccgaaatgacctgctcaagaagacaatcctcgccaatctgcgttttttgcataataatacagtttttcagcttcgtaccctttccgacatggaccgccctgaacaaaatgcagttttcaacctctccttcaagcacacagccgtttgccaccaaagaatttttgacagtgctgtgctttccgtatttcgtaggcggctcatccttcacttttgtatagataggctgctgcggcaaaaacacctgctgccaaaaacgaggctgaatgagctccatactgtgggtataatatttttccaccgaatcaatgacagcagcataacctgaatattcataagggcaaatggtcagggcggaagattccttttcaacagcctcctgaatggttttatagcctttttcgctatgtccgtagatcagatcctttaaaagcgttgttgacatgatatagatttgcagcgactggccgtcctgaaatacctcggtgacgtcgcagccaacctcctgatggcgtttcagcacatattgaaattgaatgttgcatacggtatggctgttggagattacagcatattgctgagtgcttctgtggaagtaatctagatggtccgaaaactggcgaaaggaaccgaattcatcgtattcgtgatgaagatggggagacgggaaaaaaaagaggccgtcctttttccggtgcaaatcccattccttacccgccccaaggtgatccatgagcgaacggtaacgatacttcggaaaaattgcaacactcctaatatccgcattcaccatgttggaaagcataaaatcaatcagtcggtacctgccggcaaaagggatcgccccgagcgaccgctttgctgttaaatcctgaagagaatgcttatatgtggtttcatctataacacctaacatttgattattgaacactgactctgccccctcttcagtaattaaatcaattctttttctacaaattcctctgaaacgagcagcacctcttcaatgtctttttcggagcgaatcactgcgccatccggcagcaccatcccattaggaacaatggcattttcaatgactacatgctccccaatcgtcacatccggcattatgacggatgatgtaacagtcgtatgcttaccaacagtcacaccttgaaaaagaacggagtgagacacatttccatatacaacacaaccttcgttcacaagcgaatcttgaacctgcgcatcagatgaaataaattgcggaggctgatttggattgacggagtaaattttccatttgcgttcaaacagcttcagctccgagtcctcttttaacaaatccatattggcttcccacaagctctgcaccgttccgacatccttccaatatcccttgaacggataagcagaaagcttctttttctcttccaaaagcagaggaataatgtctttgccgaagtcgtggctagaataagggttttgatcgtccatctcaagatactgtttcaaaagcggccaattgaatatataaattcccattgaggcaagattgctcttagggaatttgggcttttcatcaaaatgtgtgatcgtcccatctggattggccttcatgatgccgaaccggcttgcttcctccaagcccacttcgatgacagagatggtcacatctgctttcttttcaatgtgataatcaagcattttgccgtagtccattttgtatatgtgatctcctgataaaatcagtacatactcaggatcatactgattcaaataattgagattttcataaatggcgcttgccgtccctttataccacttgacttctgatgactcggcataagggggtaaaaccgtcacgccaccattatatctatccaggtcccatgcactgccgatcccaatataggaattcagctcaagcggctgatattgcgttaaaatcccgactgtgtctatgcctgaatttgaacagttgcttagggtaaaatcaataatcctgtatttacccccgaaagatacagccggtttagccatattttttgttaatccgctgagacggctgcccttcccgccggcaaggagcatggctacacattgttttttcatctttttatctctcctctttttttaaccgcccgtaaaatcgagatgccgtaaggggggatggtcatcgtgatataacacggtttatgatgaagtgctccctttttagccgataatggctttttgttgatttgccctgagcctccatatgtttcactgtcactgttaagcacttcaatgtattgagtaaaaaaaggaactccaacatcatattgatgatagaccacgggtgtaaaattacaaatgatgacaagcgcctcaccgtgctttttgccataacgaataaaagaaaagattgattgttcgtcattatggacatcaatccattcaaacgattgtgcacgatggtcatgctcataaaggattttgcttttttggtaaaagcggagaagatcttgcgtaaaaacgctggctttctgatgcatggggaaggagtccaaaaaccaatcaagctgttctgtatctttccattcatcaaattgggcaaactctgatcccataaagatcaatttctttccgggatgcactgtcatatagcccagcaaaagccgatactgggcaaatttctgccagtagtcgccaggcattttattaagaagtgatttttttccgtatacgacttcatcatgagaaaacggcaatacaaaatgttcactaaacgcatatagtaatgaaaaagagataagctgatgacaatgccgcctttcttcgggcggcgtctccatgtatttcagtacgtcattcatccatcccatattccatttataatgaaaaccaagccccccttcctcaacggcacctgtcacttgaggccattctgtagaatcttccgcaatcatcatcacatggggatatgcctctctcatggtttgattgagtttttttaaaaactcaacagcatatggattcgtgtggcgttcatcctgatttggccaatacaagatattagccactgcatcaaccctaaatccatctatatgatagaattccgcccagtacaacgcattcgaaattaaaaaactatgaacttccggttttcccaggtcaaagtttgccgtgccccataaccagttctcccgatcacgttcttctttgtattcataaagcggttctccatcaaacatatagagtccatgtgcatctttacaaaaatgtccggggacccaatccaaaatgactccgatattttgttgatgacattcatcaacaaacttcatcagatcatgcggcgggccaaacctgcttgtcgggctgtaataccccgttccttggtacccccatgaacgatcatatggatgctcatacaccggaagcagttcaacatgggtaaacccatgctccttgatataagggataagcgtctgacttaattctttataggaataatgcctgccatcagaatgcttcttccaagacccaagatgcagttcataaatgaaaacaggtttttcatacagcgtcttagtcttctgtttcttttgccatttttgatcttgccagctgtacccttccaaatcgtaagtaagtgacgctgtgtttggtctgacttctgaataaatagcgtatggatctgccttcagcctgatctcaccgttattcgtcacgatttcatatttatatcgttccttttctcctaaacctggaataaataacgtccaaataccactatcattcactctgtgcatcacatgctcttctccagaccagctgttaaaatctccagccactcgtacttccgacgcatgaggcgcccacacacagaattcatatccgcttttgccattcagctcgcggtaatgcgagccaaacagctgatagctttcaaacagactgccttcgtgaaaaagataaacatcatgtgctgtcgggctggcagcggccatgtaatcatcctttctgacatcatagttttcatttatagtatttattcgaagaaataaaaaaaagccctttgctgaaagcgcttatacttatagacaattaacttcattttctgaagaaaaacgaaatatatggagatttttgtagtctgcttttaaaataaagaacaaaatctaagacatatcatgatttagaaaacaaaaaaaccttgcaggatatgcaaggcttctggatgacccgtacgggattcgaacccgtgttaccgccgtgaaagggcggtgtcttaaccgcttgaccaacgggccgataattattatacctgtaatcatatggcggagaaggagggatttgaaccctcgcgccgcttacacgacctacacccttagcaggggcgcctcttcagccacttgagtacttctccatttggctccacaggcaggattcgaacctgcgaccgatcggttaacagccgatagctctaccactgagctactgtggaatacaaaagtcatggtgggcctgaatggactcgaaccatcgacctcacgcttatcaggcgtgcgctctaaccagctgagctacaggcccatgacgatatagaaatggagcgggtgatgggaatcgaacccacgacatcagcttggaaggctgaggttttaccactaaactacacccgcaatttttatttggggcgattgatgggaatcgaacccacgaatgccagagccacaatctggtgcgttaaccacttcgccacaaccgccaaaatatattgataaatggtggctcgggacggaatcgaaccgccgacacacggattttcagtccgttgctctaccaactgagctaccgagcctaagtatttaaatggcggtccggacgggactcgaacccgcgacctcctgcgtgacaggcaggcattctaaccaactgaactaccggaccattttaaaatttggttgcgggggcaggatttgaacctgcgaccttcgggttatgagcccgacgagctaccgaactgctccaccccgcgatgattaggaatatgtatggcggaggaagagggattcgaacccccgcgggctttgacacccctgtcggttttcaagaccgatcccttcagccagacttgggtattcctccgtatagtggtggaccttgtaggactcgaacctacgaccggacggttatgagccgtctgctctaaccaactgagctaaaggtccattggtagcggcggaggggatcgaacccccgacctcacgggtatgaaccgtacgctctagccagctgagctacaccgccaaatatttttagaaatcaagtggagcctagcgggatcgaaccgctgacctcctgcgtgcaaagcaggcgctctcccagctgagctaaggccccaagaatggtcgggaagacaggattcgaacctgcgaccccatggtcccaaaccatgtgctctaccaagctgagctacttcccgatttcatatagatcatggcgcgcccgagaggagtcgaacccctaaccttttgatccgtagtcaaacgctctatccaattgagctacgggcgcaaaacttaatgccgagggccggacttgaaccggcacggtagtcacctaccgcaggattttaagtcctgtgtgtctgccaattccaccaccccggcgtggatggtatagttggagcggaagacgggattcgaacccgcgacccccaccttggcaaggtggtgttctaccactgaactacttccgcagaaatggtgcggatgaagggacttgaacccccacgtctgtaaagacactagagcctgattctagcgcgtctgccaattccgccacatccgcaacatgtaaatggtgagccatgaaggactcgaaccttcgaccctctgattaaaagtcagatgctctaccaactgagctaatggctcttcttacaagagacttgaatattatatcatataaaagtggtgccggcaagaggacttgaacccccaacctactgattacaagtcagttgctctaccaattgagctacaccggcatatatgtaaaaccgatatgtataatgaaaaatggtggaggatgacgggctcgaaccgccgaccctctgcttgtaaggcagatgctctcccagctgagctaatcctccatacttgcactaacgtgcaattgcttggcggcgtcctactctcacagggggacccccccgactaccatcggcgctgaagagcttaacttccgtgttcggtatgggaacgggtgtgacctcttcgctatcgccaccaaacaaattgagagtgttctctcaaaactagataacaggtgtgacatcattcaaaaatatggttaagtcctcgatcgattagtatctgtcagctccatgtgtcgccacacttccacctcagacctatcaacctgatcatctttcagggatcttacttccttgcggaatgggaaatctcatcttgagggggcttcatgcttagatgctttcagcacttatcccgtccgcacatagctacccagcgatgcccttggcagaacaactggtacaccagcggtgcgtccatcccggtcctctcgtactaaggacagctcctctcaaatttcctgcgcccgcgacggatagggaccgaactgtctcacgacgttctgaacccagctcgcgtaccgctttaatgggcgaacagcccaacccttgggaccgactacagccccaggatgcgatgagccgacatcgaggtgccaaacctccccgtcgatgtggactcttgggggagataagcctgttatccccggggtagcttttatccgttgagcgatggcccttccatgcggaaccaccggatcactaagcccgactttcgtccctgctcgacttgtaggtctcgcagtcaagctcccttgtgcctttacactctgcgaatgatttccaaccattctgagggaacctttgggcgcctccgttaccttttaggaggcgaccgccccagtcaaactgcccacctgacactgtctccccgcccgataagggcggcgggttagaaggtcaatacagccagggtagtatcccaccgatgcctccaccgaagctggcgctccggtttccaaggctcctacctatcctgtacaagctgtaccaacattcaatatcaggctgcagtaaagctccacggggtctttccgtcctgtcgcgggtaacctgcatcttcacaggtactataatttcaccgagtctctcgttgagacagtgcccagatcgttgcgcctttcgtgcgggtcggaacttacccgacaaggaatttcgctaccttaggaccgttatagttacggccgccgtttactggggcttcaattcgcaccttcgcttacgctaagcgctcctcttaaccttccagcaccgggcaggcgtcagcccctatacttcgccttacggcttcgcagagacctgtgtttttgctaaacagtcgcctgggcctattcactgcggctctctcgggcttgcaccctaacagagcaccccttctcccgaagttacggggtcattttgccgagttccttaacgagagttctctcgatcaccttaggattctctcctcgcctacctgtgtcggtttgcggtacgggcacctctcacctcgctagaggcttttcttggcagtgtggaatcaggaacttcgctactatatttcgctcgccatcacagctcagccttatgggaaacggatttgcctatttcccagcctaactgcttggacgcggatatccaataccgcgcttaccctatcctcctgcgtccccccattgctcaaatggtgaggaggtggtacaggaatatcaacctgttgtccatcgcctacgcctttcggcctcggcttaggtcccgactaaccctgagcggacgagccttcctcaggaaaccttaggcattcggtggaggggattctcacccctctttcgctactcataccggcattctcacttctaagcgctccaccagtccttccggtctggcttcacagcccttagaacgctctcctaccactgttcgaagaacagtccgcagcttcggtgatacgtttagccccggtacattttcggcgcagagtcactcgaccagtgagctattacgcactctttaaatggtggctgcttctaagccaacatcctggttgtctaagcaactccacatccttttccacttaacgtatactttgggaccttagctggcggtctgggctgtttccctttcgactacggatcttatcactcgcagtctgactcccaaggataagtcattggcattcggagtttgactgaattcggtaacccggtaggggcccctagtccaatcagtgctctacctccaagactcttaccttgaggctagccctaaagctatttcggagagaaccagctatctccaggttcgattggcatttcacccctacccacacctcatccccgcacttttcaacgtgcgtgggttcgggcctccattcagtgttacctgaacttcaccctggacatgggtagatcacctggtttcgggtctacgaccacgtactcatgcgccctattcagactcgctttcgctgcggctccgcatcttctgcttaaccttgcacgggatcgtaactcgccggttcattctacaaaaggcacgccatcacccgttaacgggctctgactacttgtaggcacacggtttcaggatctctttcactccccttccggggtgcttttcacctttccctcacggtactggttcactatcggtcactagggagtatttagccttgggagatggtcctcccggattccgacggaatttcacgtgttccgccgtactcaggatccactcaggagagaacgaagttttgactacagggctgttacctcctatggcgggcctttccagacctcttcatctacctcgttcctttgtaactccgtacagagtgtcctacaaccccaagaggcaagcctcttggtttgggctaatcccgtttcgctcgccgctactcagggaatcgcatttgctttctcttcctccgggtacttagatgtttcagttccccgggtctgccttctcatatcctatgaattcagatatggataccactccattacgagtggtgggtttccccattcggaaatctccggatcaaagcttgcttacagctccccgaagcatatcggtgttcgtcccgtccttcatcggctcctagtgccaaggcatccaccgtgcgccctttctaacttaaccgttaaaaagaatcactatgtgatatcttgtattactaattgaatgtgatgtctactgttatctagttttcaaagaacacgtttcgaaggaatgatccttcaaaactaaacaagacagggaacgttctgtttataagacccaaggtcttatattccgtataatatccttagaaaggaggtgatccagccgcaccttccgatacggctaccttgttacgacttcaccccaatcatctgtcccaccttcggcggctggctcctaaaaggttacctcaccgacttcgggtgttacaaactctcgtggtgtgacgggcggtgtgtacaaggcccgggaacgtattcaccgcggcatgctgatccgcgattactagcgattccagcttcacgcagtcgagttgcagactgcgatccgaactgagaacagatttgtgggattggcttaacctcgcggtttcgctgccctttgttctgtccattgtagcacgtgtgtagcccaggtcataaggggcatgatgatttgacgtcatccccaccttcctccggtttgtcaccggcagtcaccttagagtgcccaactgaatgctggcaactaagatcaagggttgcgctcgttgcgggacttaacccaacatctcacgacacgagctgacgacaaccatgcaccacctgtcactctgcccccgaaggggacgtcctatctctaggattgtcagaggatgtcaagacctggtaaggttcttcgcgttgcttcgaattaaaccacatgctccaccgcttgtgcgggcccccgtcaattcctttgagtttcagtcttgcgaccgtactccccaggcggagtgcttaatgcgttagctgcagcactaagggcggaaaccccctaacacttagcactcatcgtttacggcgtggactaccagggtatctaatcctgttcgctccccacgctttcgctcctcagcgtcagttacagaccagagagtcgccttcgccactggtgttcctccacatctctacgcatttcaccgctacacgtggaattccactctcctcttctgcactcaagttccccagtttccaatgaccctccccggttgagccgggggctttcacatcagacttaagaaaccgcctgcgagccctttacgcccaataattccggacaacgcttgccacctacgtattaccgcggctgctggcacgtagttagccgtggctttctggttaggtaccgtcaaggtaccgccctattcgaacggtacttgttcttccctaacaacagagctttacgatccgaaaaccttcatcactcacgcggcgttgctccgtcagactttcgtccattgcggaagattccctactgctgcctcccgtaggagtctgggccgtgtctcagtcccagtgtggccgatcaccctctcaggtcggctacgcatcgttgccttggtgagccgttacctcaccaactagctaatgcgccgcgggtccatctgtaagtggtagccgaagccaccttttatgtttgaaccatgcggttcaaacaaccatccggtattagccccggtttcccggagttatcccagtcttacaggcaggttacccacgtgttactcacccgtccgccgctaacatcagggagcaagctcccatctgtccgctcgacttgcatgtattaggcacgccgccagcgttcgtcctgagccaggatcaaactctccgataaatggatcacaggttaagttcaccgcatcctgcggcgacacctgtgtgacctgcgtcgtgcagaccctagtttgactgactacgcacatcgctgtgcgatttttaaaaactgaattaacaggtacgttttgtcttgtttagttttcaaagatcatttcgttacttctcaatgaagcagctttactaatataacattcagcttcttttttgtcaacaacttttttcaagttgttttgaagcatctagtttgtgtccgctgtgcatcagcgacgtttaataatataacacctgtatttatttattgcaatagtttttttaaaaaaatctataaaacaaataaactataatcctcgccatgatttctaaagcgtgtgtatcatataagtttcttaaaagaacatatacatcagtcatgtgatcttgttgtttttttcgttttcttgtatagtagaaacgaactaaatactgatgaccacaaggggagcattaaagctgagagtgagcggtttcgttctgaccctttgaacctgttagttaacgctggcgtagggatgtggcaaagtcaaatgaattgcagatcgtaaagcagtgcgtggaacttttctcatccttccgcgtgctgcttttttgttgtccttttggttgtctgtcaatggaaggagatagatatgaatcaatctaagcaactggttcgccttattgaaattgccattatgacagcggcagccgttattttagacattgtctcaggaatgtttcttagcatgcctcaaggaggctcggtctccatcatgatgattccgatctttttaatttcgtttcgctggggtgtcaaagcaggtcttactacaggtttgttgacaggtctagtacaaatagcaatcggaaacttgtttgctcaacatcctgtacagctattgttagattacattgtcgctttcgcagcaatcggcataagcggctgtttcgcttcttctgtccgtaaagccgctgtatcaaaaacaaaagggaaattgattgtttcagtggtcagcgcagtttttatcggcagtttgctgcgctatgccgcgcatgtcatttcaggagctgtgtttttcggcagctttgctccaaaaggaacaccggtatggatttattctttaacttataatgcgacttacatggttccttcattcattatttgtgcaattgtcctatgtttattatttatgacagcaccccgtttgcttaaaagtgacaaagcgtaaaagtaacaatcccccagcgaattccgctgagggattgttcgttatctgttaagaagtgtttttaaagctgaaagatccggccagccaagacctacttctttcagccttactccggcaatttcaaagttgtcctccgctactctttcaggtgaataggcctgataaaatataattgagggattctgctcaataacccaaacaaacatacttgaaaatccatgttgaagcaaaaactccgctccttttgctaagagcgccctgcctgcaccttgccgctggcgctcttccagaagataaatagcgtataactcgccgtcatagccttcttgttcagagcgaataggtccaaatgaagcaaagccgaatactgaatccatttcgtcctgagcaacaaatactccttttaacgagcgacttttccatttgtcttcaaattccttatagttcaggctgtttaaataatcaatcgggataatttcgtggtatgttgtcctccagctgtctacatgcacttttgcaataccctttatatcctctaacttcgcttcacgtacagttaccatacggttctgtcctttccttactctgatttttggaccgttttggcttctttgatttcatttgttaattcattgatgctttgttttacgtttccttttcctgaaaagttctcaagcatttcttttacatcgattcccgaggatgcttttaaactttcttgcagacttgacattaagttcgtcgcatagctggttactttgtttgctccgcttgattcaccgcttcctcctgtatcgacaacggtgattttatcaatatttgaaagaggtgccgctgcttgtttcgcgtattccggaagcattttgacaatcatatcgaaaatcgccgcctgcccgtactgttcaaaggcggccgcaattttctcttttgcttccgcttctgcaagacctttcaggcggataacctctgcttctgtctctcctttcgctttttccgcttctgcttttgctagcccgtcaattcttactttttccgcctcagcctttgccattgcttcaatactgtacttcttggcatcggcttccgcgagctgtttggctttctcagctgctgcggactgctcaacagaataacggtctgcatcggcttttttctttacctctgagtcgtattgacgttcacggcgaagaatttctttttcttctagttctatttgtttttggcgttcgataattttaacctgcatttcctgctctgtgacttgctggcgcgctcgggcagtctctaaatcatatgcttggtcggcattcgcttttgccgtatcttgttctctgcggaattcagccattttgagctgattgattttttcagcttcagcgatttccgtcgcccgttcaagttctgatttttttgcgtctttatcggcttctgcccgcttaattcgggtttctttatcagcctctgctgttgcgatatcagcatcgcgttttacttgggcaattctcggtttccctaatgattcaagataaccgtttttatcacgaacatctttaatggtaaacgagacgattacaagtcccattttcgcgagatcctgtgaagcgacacgctgcacctcttgagagaatttttctctgtttttatagatttcttctactgtcattgagccgagaatggaacgaaggtggccttctaaaacctcccgcgcttcctgctcacggtcgtcttttgatttccctaaaaattgttcggccgctgtagcgatttctcctatagaaccgccgattttaataatcgcagttccatcggccattactggcactccttgttctgtatagacttcaggtgtcgaaacatcgagtttgcttgataataggcttagcggctctgcctgctggaagacgggaaggacaaaggttcctccgccgcggacgattttaatacggttgccgccttcatcgacatgaacatttttattacccagatagctccctgttacaattaacgcttcatcaggccctgctgtacgatacttcgtaataaacacagctattagtgcaattaataaaaagaatacaactccgatgatcattataatcggcattgtcatatcaaattcctccttttatgttaaatgggttcatgcggagtaaccgaaagaactccgtttttgacatctacgactagcactcttgtgccataaccgatctgttgattttcaaagctgatcgctgacttcgagatggtgccgcctatcccttcaatgaccacttcaccaaacccgtcaacaggaacagctgtaatcactttaccgagtcttcctctgagatcatcttctctatatgccaatgattcttctgcagatgataatggtaccagtacaaagatgtgaagcaataccaccagcatgatcgaaaggatgcaagataaaagcgcaatcagcaagcttgacagaggcaatacgagttcacctatatatccgtccgctgaaaaacatgtgaaaaatgagagcactaatgtcggattaagaaacggaatgccttctggcagccctgcaaatacatctccgaaaaacagaaataacagcgtaaggctgcccgcaataataagcgtataaagataaattgtttgtataggtactccaaataactccaatttcctcatcctttcttcatcaatgcattgatgaacggctgccgttaccattaatacgagacaccccgggaaaagtttcaaaattttaagataagtaacccatttgaagtgctttataaatgataattgcttatatatatggtaatgtcattttaggaggagatatgatgagtatctttaatgaagccagattagaaacgtggaacgaattgaaaggactttctgacgaaaagctgaatcaaaagccttctgctgaagaatggagcatacgggaagttcttgaccatttgaaaaaaatcgatatgaccgcacaaaaaatgttgaaggaacgtgtacaggacgctccgattaaagaaattgaagaaaaaccgcttgaggtagcacaggacagaaataataaacggaaagccccgagtcatcttgagcctgcgcatgattttatttcaggcagccaaatgaaacgtgagcttgatgtggtaagagagcagctgactgctgcgattgcctctctgaaagaagaagattttgaaagagtgcttccgcatcctgtgtttcaagagctgactgtcagacagtggatcgattttatcggccatcatgaaaaacggcacctcagccaaatgaaagaaattaaagaaaagatagaaagggcctgatttaatcagaccctttctgcttttcgtttgacttttcgctgataggaatgaacttctatttcatcacctgtgtaaacagcaccaggtctctccacaatacagacaacccctctaatgcccagtgcgtggcggacgaaagccggcgccagcttcggttggtccggataataagactgaatgacttctcccggctggatacacggatcattttcgccctcacacagcagagccgctccgctcggaaaaataatccggcttccttcttttaatgaagtaagatctggcataccgctgactgccacattcgccccgagccattccggcaaaattctcggcactcccatttttaaagcgatttcgttgcattcctctattgaaacaattgaaatttgtctgcggttgaaaatttcagtccctcttgaaaacattggttctctggctcccgcttttttggtcaggccaaaatgcaagtcgccggggatgccgccataatcaaaatcaagcttgtccatttgctttgttacgaagctttctgtatctgcgatatataagccttccgcttttgcagtcatacgcttccacatcagctggcaccttccttcttatctaaaatttccgcctatgcttcattatcccaaaaaatcccgctctgtaaaggagcgggattttgattataccgttttaggcgtaaggttaaagcagcgcttgtagatccagttgtatgctttttcatttaaatctctagggtttccgaaggtttgcggatctttcattgcttctttagacaagcgttcgatcatatcaggtgatactccctgctcttctaaagtcagcacttctaaatcttcgaccagatcatacatccaattgacagatgctttcgcagcttcttctgttgtcatcttgcttgtatcaataccgaacgctttcgcaatacgcgcaaacttctcaggatagcccttccagttgtattccatgacagggcccatcatcgccgctacacattggccgtgagcgactgggataataccgccaagcgtttggctcatcgcatgagccgcgcccgctgattcacttccgtaagaaaggccggcaagcatcgctgcctgcgccattccgtaccttgcttccagatcctctccgtcagcaaatgccctcttaatgtaatgagcggcatactcaatcgccattagggcaaccgcatccgtgattggctgtgcaaatttcattgtatagcactcaatggcatgggcgagcgcatcaattcccgtcatagctgttacatgcggaggcattgaaacatgaagctcaggatcaatgatggtcaagtgcgctgcaatcagcggaccgcccgtgttgaatttgaattctctttcttcatctgtgataaccgcccattgggttacttctgatcctgttccagctgtagtgggaattgtcgtcagcggaggaatgcggttttccagcggttttttcccatctgccgcttcataatcaagcacgcttccttcgtgagtcgcttctactccgattgcttttgctgtatccatggagcttccgcctccgactgccaccaaaccattacagttctcttttttgtaaagctcagatccttcattcaccagacggacaggcgggtttggctcaactttattaaagagcaccacttcaatgcctgcttctttaagtgattcgattacaggatcagcaacaccggctttataaatccctgggtctgtgacaaggagcgcttttgaaacgcccagtgcagctacttcctcacccgtatgcttgatggctccgattccatgcttaatcacagtcggaatttcaaatgtgtggaatttctgcatgctttctaccttcatatttaatgtcatcatcaatctccccctcttatgaattgaaccagttaaccgctgccggttttgtattacggtatacatgtttgacttctgtgtattcttcaaggcctatttttccaagctcgcgtccgaacccggattgcttatatccgccccatggcgcttgtgcaaagtacggatgaaaatcgttgatccaaacggttcccattctcaagcgggctgctacccgttcgcacttttcaatgtcttttgaccataccgctccagccaagccatagatggtatcattcgcaagctcgattacctcttcttcagagctgaaggtttcgactgtcaatacaggaccgaaaacctcttcctgaacgattctcatgtcagaattacagtttgagaaaatagtaggttcatagaaaaagccgttttgaagctcaggatcttccgggcgtttgcctcctgtctccagcttcgcgccttcctctattccgatctcaacatatttttctacctttgccctgtgctccgccgaaataagcggaccgctttctgtctcagcatgaaaaccgtttccgagttttatgcgttttgcccgtttgaccagctccgccaaaaattgatcatgaatggcatcctcaacaagcaagcgggaacctgcagagcatacttggccggcgtggaaaaatacagcgtttaaggcctgatcaaccgcaacttctaaatccgcgtccttgaaaacaatatttgggtttttcccgccaagttcaagggcgatttttttgacgtttccgcttgccgcccgcatgatttttttgcctgtttcaattccgcccgtaaacgaaatcaaatcgacgtctttgtttacggcaagctcgtcgcccactgtggctcccggtccaaggacaagatttgcgacaccttttggtacaccggcttcttccatcagcttaaagactttgattgtcgtcagcggcgtaatctcactcggcttcatgacgattgtgtttcctgcagccagtgcaggggcgattttccagctcgcttgaaggagcggataattccatggagtgatctggccgcaaaccccgattggctctctaataattttgctttctgaatcaggaatcggagatgaaatgatctctcctccatctttgtctgccaagccggcgtaatattgaaaaacattggcgatatcgtccatatcggccttgctttcttcgagtgtttttcctgtatcaagagattcaagctcagccagctcctcaagatcgcgtctgattaattccgcaattttcagaacaatttttccgcgttcaagcccggatagcgatgaccattctcctttgtcaaatgctctgcgtgcggctgcgattgctttgatggcgtcctctcgccctccctcgcttacagttgcaatttcttcttgattaaatggattgataatactgcggatctgttctttttcggcactgatccattctccgtcaatgaataatgtttgactcatataagcctccttgacgtaaataaagtttgttaaataaaaatttaatgtttttaacaaccttaatctaacatatggtttttaaactgtcaaagtcccattttgatttttctttttgacttttcctcatgtttcgttaagataaagaacataaagaaataacttaacgaatttaattttctaaaggaaaagagggtcagtatggatgaaaatccagaatttgcagctatagaacaggctcgggatcttgttattgactccattgctgaaacgatggatctttacggaattacccgcagtgtcgggattttatatgggacgatgtatatgagggatgagatgacgcttgacgaaatgcgtgaggagttgcaaatgagcaaaccaagcatgagcacaggcgtcaaaaagcttcaagacttaaatgtagtgaaaaaaacatttcaccggggcatccgtaagcatacatttgtggctgagaaggatttctttaaatttttcacaaatttctttccacctaaatgggagcgggaggttcaagtgaatgtagcagcgatcgaggaagctcaagctgatttacaaaaggttttatgcaaggaagatctcgatgaggatatcaaaaatgaagcactgcagttatatgatcagctggaaagctctaaagcttactatgactggctgaaacggcttgctgaatcggtgcagaccggagaaatttttaaatttataccgatcgaaacaaagtaaagcagaaaacgcctgggaaagcaggcgtttttttgatgtaactactacaaatttgaaaaatacgggaaaaacaccccatttacttccaaaatatttgatggtaattttatgtaggtaaaatttgtatttggcctttcagaggaggtgaaaagcgggcaggcctgtttaatttatcattttttagggggaattttgttatgaaacgcaaattattatcttctttggcaattagtgcattaagtctcgggttactcgtttctgcacctacagcttctttcgcggctgaatctacatcaactaaagctcatactgaatctactatgagaacacagtctacagcttcattgttcgcaacaatcactggcgccagcaaaacggaatggtctttctcagatatcgaattgacttaccgtccaaacacgcttctcagccttggcgttatggagtttacattgccaagcggatttactgcaaacacgaaagacacattgaacggaaatgccttgcgtacaacacagatcctcaataacgggaaaacagtaagagttcctttggcacttgatttgttaggagctggcgaatttaaattaaaactgaataacaaaacacttcctgccgcaggtacatatactttccgtgcagagaataaatcattaagcatcggaaataaattttacgcagaagccagcattgacgtggctaagcgcagcactcctccgactcagccttgcggttgcaactaatgtaaaagaccggttaacgccggtcttttttgcgttttaccctcccctttttctctaattcccgttatcttttttctggtttaaaatttaaattgacaaacactagaaacaggagtaaattcttgagtgttcaatttcatacagtctcttttaccgcttaatcaaacacgaacgggggaaccaacgattggctgttttattaacagccttggggtgaatcttactaagtaagagggggtactctgaatccctaatccgacagctaacctcgtaggcgtatacagagaggaggtctattatttggccattctttgcaatggtcttttttgcttcagaaacgttaattcactaagggagatatgaacattgggaagaattaaaaataagcaatttgccgtgatcggtctgggccggtttggcggcagcatttgtaaagaacttcatagaatggggcatgaggtccttgcggttgatatcaacgaagaaaaggtcaatgcatatgcttcttacgccactcatgcggtaattgccaacgccaccgaagaaaacgaattgctttcattaggaatacgcaattttgaatatgtgattgttgccatcggagcaaatattcaagcgagtacgctgaccaccctattattaaaggagcttgatattccaaatatttgggtgaaggctcaaaactattatcatcacaaggtgcttgaaaaaatcggcgctgaccggattattcatcctgaaaaagatatgggagttaaaatcgcacaaagcctttcagacgaaaatgttttgaattacattgatctatctgatgaatacagtattgtcgagctgctggctacgcgcaagcttgattcaaaatcgattattgacctgaatgtaagagcaaagtacggctgcacgatcctggccatcaaacatcatggagatatctgtctttcccccgcgcctgaagacatcattcacgagcaagattgcctggtgatcatgggccacaaaaaggatattaaacgttttgaaaacgaagggatgtagacaaaggtgacacttcaaaaggataaagtgatcaaatgggttcggtttacaccgcctcaagtgcttgccattggttttttccttaccattatcatcggggctgtcctattaatgcttccgatttccactacgaagccattgtcatggatagatgctctttttactgcggcttccgctacaactgttacagggcttgctgttgtcgataccggtactcaatttacggtattcgggcaaacagttattatggggctgattcagattggcgggcttggatttatgacgtttgcggtcttgatcgtcatgatattaggaaaaaaaatcggattaaaagaacgaatgctcgtccaggaagccttaaaccagccgacaatcggcggtgtcattggccttgtcaaagtcctgtttctgttttcgatcagtattgaattgatagcagcactcattttatccatccggcttgtacctcagtacggctggtcatccggcttgtttgcaagtttgtttcacgcaatatctgcttttaacaatgccgggttttcgttgtggcctgataatttgatgagctacgttggcgatcctacagtaaacctcgtgattactttcttatttattacaggagggatcggatttacggttctgtttgatgtgatgaaaaatcggcgttttaaagctttttctttacatacaaagctcatgcttacaggaacgctgatgttgaatgcgattgctatgcttacggtctttattttagaatacagcaaccccggcacgctcggccacctgcatatagtcgataaactgtgggcgtcctattttcaggcagtgacgccgagaaccgcaggcttcaattctctagattttggaagcatgagagaaggaacaattgtatttactttattattgatgtttatcggagcaggaagcgcatcaacggcgagcggcattaagctgactacgttcatcgtgattttaacatctgttattgcttacttgagaggtaaaaaagaaacggttattttccgccgttccatcaaatatccgattatcattaaagctttagctgtgagcgtcaccagtttgttcatcgtgtttttagggattttcgccctgacgatcacagaacaagcgccatttcttcaaattgtgtttgaaaccttttccgcattcggaactgtcggccttacgatggggcttactcctgaactgacaacagctggcaagtgtatcattattgtcatcatgtttatcggaagaattggtcctttaacgttcgtgttttcattcgcaaaaacagagcaatcaaatatccgttaccctgatggcgaagtgtttacagggtgatatcaaaaaaatccggcgtgcagtcgccggatttttttatgattcgatatgagattgattttgtcttttttcctgttccgcgatgatttcattatcctccgcgttatcacgggttactttttgtgtaagaatcgcaccaactgctacaagtatcataacagcgatgtaataacctttttcattgagttccaggttatcagcattatagagtccgatactaaacaaaaatactcccgcaaaaaaagtaaaataagctaatactgtaaaggcaaccgtgtttctgcgtctatatttctgcacctttgttccctcccgaaagcatagttaaaaagtgataacttccgtggaatattatacctcaaattccccgtaatggaacaaagaattaaaaataccagtaaaaagggcttaggttgcctcctttatttcaacagctgaatcatcaatccagccgataagtttatcattgatttggaattggtaccatacagactggcctttctgttttttagacacaacctttatgtctttgccgacgtaagattgggcagaggtaagccttatggaccgatcatcagtagagggcttggaccatacgtcttgaacggcactgtctttaatagaggcgtttaaatccacagatttgagggatggatttacctcatcgtactcatctaaatcgtatttttccacaatagcgctgattttgtcagcgtagtcagggtctgtagcatatcctgatgtttgcagggcggttgccgcttccttataattccctgcctcaagcaccggtttatacttctttttattccacgatgtgccacgaacgaacaattgggcgtgatcatccatagattcaaaaaacgtgctgtattttcgaaacttcgcgcgaatggtttttcttttccctttttcaacttcgtccgtttccatcgtgacatgatggcctttataattcccttttacgccaaaaaggttgttggccttagcagccagttcactgttcccccagtccgattcgagaatggcctgagcaattgtgatgctggggagaacatggtatttttcatacaaaatttgggcatgtccggacagactgtctataaatacttgctgttcatcgatttcttcagtttctttggatatttcaatcggttttgataaagttgtcgctaaaacaaacagagctagcggaatcgatacaaggaaaaatagtgaaatcaagagtttacgttttttaagttttttacgggccatgaaaaccttccttcgaattaaaagattacgaatgtaaaagaatctaccttttagaattttacttgcacttctaatatttttcaattctttagggataaagttgggaaaagattgcaaaataaaaaccttttcgctcaatgaaaaggtttttaccatgtttctatttttgtaaatttctgagtgcattacgatattccgtatcatttattactttatatgatttgacagttgccttcgacaaaccttctgctgaaacggccggtttttccggagctgttttcgctttatcatgtggtttatgtgccagcttgtgccccattccagtggcattcatacaaaatgacaggcagacgagcagcacgctaaggataaaagaaatgaagaagagatcatgataagcagtcatcatagaatcctgttccgaaccgctttgtctggcagcatcttttttcgtgaaaaagccgatgagaatgggaactcccatatagacaaacaatcttaaaaactgaacagctgtcattctcttgaccaaatcaggcagcgggcctcccatggcagctcccatcagccctgcggcgactgtcaggcctgttcccgctgcaagcatgataaacagtgccgcgaacatataaagagatgatcgatcctgtatatgcagccattgaaaattcacaaaaacgagaatgagtccgccgataataccgagcatccctggtccgactttatcatataacagagcgcttaaaatggccgcgatcgccactccgattaaaagagtcaagtttaaaaaaatgagatgctcctgagaaatatcatacatttgacggagcaagccttgaaaagcagacaggctgacagctaccgttatcgtccctgcagctatgatcaataagccaagcaccggttttggcagcagcatcagtttaatagatatgaaggggtttttcactttatattccacaatcaatagaccaatgagcaaacataacgtcaccccgaaaccaatccatacataacccgatgacagcccccatttttgcagaaaaatgaatgaaaccgctgaggctgcggcaaggaagacagataaaagaattcccgcacgatcaagcggctgttcttgatccgccgctccgtgatgctcatcatgaagaaagaaatagctcaccgcgacaccgatcagggacaaggtgccaaagatgataaacagccatctccaatgcccgcagcttgttgcaatggttcccaggattgtaccgatgataacagaaccatagaatcccccgatcagcacaagcagtgcatagttcctgcgttcaatcgggaatgacagtacaagcattggaatcataatcatcagcatgacgcctgttgccgccccctgtaaaaagcgccctgccgccatccatgcaatatcgcctgaacatgcgatgagcagtgagcctagtataaagacaggtaatgaagccagatagacgggacgcgcaccgaattttttcctcagcagcggtcctgccggaactaacaaggcaaaggccatattgccgatcaatatcgggtttactaatgtgaagacacttgttccaaccgctttctgaacaaggccttgaactgacgacaatgccgtgttagacatcaatcccggcccgaccgctaagacggcgagcaaagaaatcacccaatagtgttttgtcttcatgttgtcattccttcctatatgaatacatgcgaaacacatcattttttgaaaacaaaagaagctaatagattttgcataccattagctttcattctaatattctccctttcaggggaaatgatattattttattataattatgtgaatgaatgagcatataatcaaatattatttcaaatcgattgtgttttgtcaatggagtaaatttcaagcacaacatagaaagcttgaaagcttttccccgatattgtgtctagaactgcacttatgaatccctgctcgttccctcaagcgaattaaagcaggccgttttaatcctttcaatccactattcccactaataaactcgaataagttggtgataagacaacattttgcccccacatttttttgtgttcactgggcgtttgccgcctctaaattgtatatgggtaaataccatgaattaacctatgaaataccaatgtaaggaaattctaaatattccgggaggcaaaaacgaatggaactgtatgagtgtatccaagacatttttagcggcttgaaaaatccatcggttaaagatttagcaacgtctttaaaaaaaattccaaacgcagcaaaattaagtcaaccgtatattaaggaaccagaccagtacgcttacggccgaaatgccatctatcgaaataatgaattggaaattatcgtgattaacattccgccaaacaaggagacaacagtccacgatcatggtcaatccattggttgtgcaatggtgttagaaggaaagcttcttaattctatttatcgctcagccggcgaacacgcagaactctccaattcatactttgtccacgaaggagaatgccttatttcaaccaaaggtttaattcacaaaatgtctaatcccacatccgaacgaatggtgtctcttcatgtctactcccctcctttggaagacatgacggtctttgaggaacaaaaggaggtattggaaaattcatgattgacagataaactgctcactttgacttcgctcaactggaggattcagagaatgaatcttttcctcaaaacaaaaaaacccttatagaataagggtttacaggtatggagccaagggggctcgaacccctgacctctacgctgccagcgtagcgctctcccagctgagctatggccccgtatgtaatgtcatgtttattatagatgattttattttgaaaaacaagctgtttcctcttgaattgacagaaaaaataaggctcgtaaaagagccttattttcgacttacatcatgatcaaaagtaaaatcacaccgagaataattcgatagattgcaaatgggacaagtttgattttgttaatcagccttaagaagaaacggacgacaaacagtgcgacaacaaaggcacagataaagccgacgatgaaaaatggcatcagatccgagcttaagctgtcccaatgcttcacgaggcttagaaagctggctcccatcatgatcggcatcgccataataaacgtaaagtcggctgcagctcggtggtttaatccgagaataacaccgccggaaatggttgaacccgaacgcgagaaacccggccaaagggcaagacattggaataagccgacggctatcgcctgtttataggaaatgcggtcgagtgtgtctgtcgctgttttccgtttattgacccagtcagcaaaaagcatgaggattgccccggcaattaaaccgatggccacagttttaacggaaaataaatattcatcaatgtaatcttcaaacaaaaagccgagaacagctgcaggcacgagtccgacggcaatttgggcaatgcttaatttatgtccctgctcctggtcgcttgtaatattttttttcaagcccagtaagtttaaaattcggtctttaaacacgatagctactgctaaaatggagcctagctgaataaccaccttgaatgagttagcagcttcttctgacatcagattacttgatttaagccagatgtcgtctactataatcatatgtcctgtcgaagaaaccggcgcgtactctgttaatccttctacgattcctaaaatggcggctacaaacaattcccatagagtcatgattttgattctccccattagacatttatttttttacataacgggagcttcccataaatggaaagcccgtcttatataactataaacgaaaatcacactttatgccccggcgtattttcatttttttcttcatcgtataaatgtgaccgcattttaaaccagtcaaataaatgtgtcgtaatgactttggcaaccgcatagccgggaatcgcaagaatgattccaacaacgccgaacagcttgccggctgttaacagcagaaaaataatcgtaatcggatggatgtgaaggttttttcccataatttgcggagagatcagcttcccttcaatcagctgaacaatcgtccaaacgatcaccagcttaagcagcatgagcggcgatgtcactatggcaatgataatcgcaggcgtaatggcaatcgttggccctaaatatggaacgatgcttgtgcaagccgcaatgactgcaagcaatgaagcataatccagcccgataatcaaataaccgataaacagcaaaaacccgatacagaagctgacaatgatctggcctctgatataagagcttaaccgatgattcatttcgcttaagactgtgtatgtctgttctttcaattgcgtcggaacaaacttcagtatgtagaccggcaatttttttccgtcctttaacaaatagaaaaggataaacggaaccgtaacgattgaaatgataatctcagtcagggcgccgataaaattcccaacgccggtaaaggtactgttcacaattgtcgctgcctgatctgaaacctttgttgcgagatcagatatattgatgttcgtcgtttgctgggcctgattgacgaagttgctgccgatcagctgtttcgtctgattttcaacgatatccacatatcttgggatgttgtcgattaaactcataatttgttcttttaagaagggaatgatcgacacgattgtgatcgtgatcagcccgataaccaatagatatagcagcaatatagaatagattcttcttattcttcttctctcaaggaaatcgacgaccgggtttaacagataaaaaacaatgcctgtcaaaataatcggaagtgatatcgttttgagcaaaacaataatcggggtgaaaataaatgatgtttttgtaaatactagaatatttaaaccaatcagcagcagcacaagcaaaaataaaacaaacttattatccaagaagaatcgcttgaatctgccgctccatgtttgcaacgtctccactatcgttcctccgtcatacatagtttaattaaattgtacactatcgtccctataatgaaaaataaaaaccgttaattgctggaaaagctttcacggttttaacattctatttatatctatcatgtgattttgttctttttaagctataatttagctatatcatgcaaaaggagcgatacgagtgatacgttttgcaataataggaaccaactggattacagaccgctttcttgagtcagcagcggatatcgaagattttcagctgactgctgtttattcaagatcggctgaacgcgctggcgagtttgctgctaaacacaacgctgcgcatgccttctcagaccttcaggaaatggcggcgagcgattgctttgatgccgtatacatagcgagcccgaacgctcttcacaaggaacaagccgttctctttatgaaccatggcaagcatgtgctttgtgagaagccgtttgcttcgaatacaaaagaaacagaagagatgatctcagcggctaaggcaaacggcgttgttctcatggaagcaatgaagaccactttcctgccgaatttcaaagagctgaaaaaacacctgcataaaatcggcactgtccgcagatttaccgcaagctactgccagtattcctcacggtatgacgcgttcagaagcggaactgttttgaatgcgtttcagcctgagctttccaatgggtcattaatggatattggcgtctattgtatttatccggctgttgtgttgtttggcgcgccgaaggatgtaaaagcaaacggatatgctttatcctccggagtggacggagaaggaactgtcattctgtcttacgacgggttcgaagctgttctgatgcattccaaaatctctacttcctatgccccggctgaaatccagggtgaagacgggacgattgtaatcgatacgattcaccggcctgaacgtgttgaaatccgctaccgggacggccgccttgaaaacatcgcgatccctgatcctaaaccagcgatgttctatgaagcagaagaatttgtcacgctcataaaagagaataagctggaatctgaagaaaatacatttgaacggtctttgaccactgcaaagattatggaagaagcaagaaagcaaatggggattgtataccctgctgatcaagcttaaaaaaatccgcccgcgtgcaaatgccgcggcggattttttattaggcaatcggagaagatgccttcctttttaaaagcacctgttgctcatattctttgatgtcatgaagccatgcctcttttaccggaacgcccatttgctcacagtaggaatcccagatggctccgaaaggatatgttttgaattcctccatcagggccagcctttctgtatagcggccctcttcctgcaattgttttaaatatccgttcgggagaagcagggcatacaataaagctttgatcatatttctcgttccgatggtccaggcggctacacggttaatgctggcatcgaaaaaatccagaccgatggcgaccttctcaagagcatgatttcgtacaatttcaagagcgatttctctcaattcatcatccaaaaccactacatggtcgctatcccaacgaacaggccgcgatacgtgcaaggcaagcttgtctgtgtaaagcagcatggacgagatcttgtttgataccgtctcagtcggatggaaatggcctgtatcaagtaaacaaagcttatgattcgtcaaagcataagctaaataaaattcatgagatccgacaacatatgattcggagccaagcccgaacagcttgctctcgattgcatcaagattgtgttgttcactgatctcctctgcgaagatccgatccagtgattcttttagtcttttacgcggtgtcagcctatcactcgggatatccttatagccgtcgggaatccaaatattcgtcaagcaaggtgttcctaattctttcccgaagtattccccgatacggcggcaagcgatgcaatgcctgatccaaaattctctgatatccggatcagggtgtgaaagggtgagtccgtcagccgctttctcatgcgaaaacaaggttggattaaaatctaaaccgagaccaaggttttttgcccatttcacccagttttcaaaatgctgcggcttcaattcgtcacgttctaccgcttccctgtttgtttctgcgtatatcgcatgcaggtttacgcggtgctttccaggaatgagagaaagagccttctccaaatctcttcttaattcttcaggagtttgcgcttttccgggataattgccagtcacgtcaattccgcctgaaagctcgcccttatttacttcaaagccttcaatgtcgtcaccctgccagcaatggatcgaaatgggcacttgctctaattgccgaagcgcctcttcaacatcaattccccatttttcatatgcctgttttgcactgtcataattggcttttatggtcatacggctctctccctttatcagttttttaatccaaataaaaaacttcctttagatctatcgaaacaggactgaaatccgaatttgttttcattaatggcgccatcgatttccaccatcttcggcaaacttccgtgtccgccatctttctccatttctcttcatcctctatttctaaatatgcaaaaagcctgcctgtttcctcgtctagaaaaatggaataatggtgtgctccatgagctttgagtgcttctgccatctcaggccaaatgtcatcatgccgctgtttgtattcttcgtacttgtcttgatggacaaacatgatactggcttttcttttcaaaccttttcacctcttcatcatttagatagcgctttcaaaacagtttgctgaaatgactgaatgatcgtgcttctgtcaatgtctttaggtgtaaacactttgatcggaaaggaatttctgacgacttgccgggcttcttttatgtctttgacttctttggcagcaatcatttgcatcaaaagatttccggtggcagttgcctctatcggccctgcatataccgcttttccactcatgtctgccgttaattgatttaagaaatcattccgggctccgccgccgatgatatgaaattgctcgatcggtttttctgtgattgtttcgagctctttgatggctatcgcatagatgatggctaaattgctgtagatgcagcaggcaagttcgcctgcagtgcgaggagtcttttggcgggtttgtctgcaataatgttgtatttcctttatcatgttttctggattcaggaaacgtttatcatttaagtttataaattgctggaatggttctgtttttttggcttcttctgcaagctgctggaaagagtaatctgcttgtaactgttgtctgacttcttgtatcacccacatgccgataatgtttttgagaaagcgaatggtgttgtttgcgccgcgttcatttgtatagttgttttctaaagcaagatcagttattatcggtgttttgttttcaaccccgattaacgaccatgttccgctgctgatatacgcccagccatcatttattcctggcgctgcaatgacggccgaggccgtatcatgtgttgcgactgtcatcaccttgcacgccgggagatcataatccgggaaccactcatttcttagcttcccgagttcacaccccggttcagtcagcggggcaaattgctgttcctgaacggacacggcttcaagcaattcaggatcaagatttcccgttgaggcttttaaaagctgtgttgtggacgcatttgtgatttccgttacagcttttccggttaaacaatagcctaaataatcaggaatcatcataattttgtctgtctttatcagcagctcacggtcttcctcatacaattgatagatcgtgttgaaaggctgaaattgtattcctgttttttgataaattgcggcttttgagagggtatgttccagtttgtctattgtgtgatctgttcttctatcacggtaggagattgcttcccgcaaccgatcgcctttttcgtccagtaagacataatcaactgcccatgtatcaatgcctacggtgcagtgttcatacccaagcgtctttactttttgcagtccttgcaggatttgttttagcaaatgatcaatatcccaaaagcaatgcccgtctctttgactgaaaccgttagcgaacctgtgaatctcttgtatgtcaagcttcccttcattcagttcacctaccatgattctcccgcttgatgcgcctatatcaatggcagtataaatcatcctttcaccctctcttcgaaagaggaacagctgtcaccttcacctttttgtcctcaagagcttttaccgatgccggatcaagtccagaatccgtaataaggcggctgacatcttgcagcgaggcaatatgtgaaaactcgcggttcccccatttgcttgaatcggccatcaaaatggtctggtccgacctttcgatcatccgttttttgagcagcgcctgccactcatttgaatcactcatcccgttgtgtacgtcaaatcccttacatgacagaaaggttttattgacatgataggtctcaagtgaacgctctgctaacggaccggcaaatgataatgatttttccagcaaaatgccgcctgttgaaatgactgatatgttttctttattgctgagttcaatagctgctttcattgagtttgtaatcacggtgagctcaatgtcagggagtatttttgccatgtaccaagcggttgtgcttgcatcgagaatgattcggtctccgctttttacatatttggccgcttcgtgagcgatggcttttttttcgatgacattcgtgatttcccgttcagaaaaatgaatttctgattccttctgctgaatactgaccgctcctccgtggctccggctcagtttatgttctttttcaagcttttcaagatcacgccgaatggtttcctctgtgactgaaaatatgtcacttaattcggaaacgcggatgcttgaacgcatatttactatttccactattttttgctgccgttctgctactagcatcggtaacgcccttcctcatatcgtagtccgtcttatattttttatcatagcatatttctaacgcgtaaaagcagcagggacgccgccgtctaccgtgatcatgcagcccgttgttttttcggctttggaagaagcgaagaatgcaatggcttcggcaatatcctccgggtaaatattgacgagcaatgctgtccgtttccggtaatgttcctccagctgatccggttcaatcccgtacgccgcggctcgttcctcccgccagcttgaaccccagattgccgatccttgaagaaccgcatcaggcaaaacagagttgaccctaatgccgaattctccaccttctgcagcaatgcatcttgctaaatgggtttcaagcgccttaaccgagctgtaggcagaggcgtttttgcccgcataaaccgaatttttcgatccgacaaataccatgcttccgcctctattttggtgtttcatctgtttaaacgcttcacgggctacaaggaaatagcctgttcctaaaacattcatattaagattccattcttttagacttgtttcgtcaaatgggcttgatgtggccagcccggcattattgacgacgatatcaatgccgccgtaagcaagcgccgctcgttcaaaagctgattgtacgtcttcctcctttgtcacatccattttgacagccattgcccgtccttctccgtatgcatcgtttatttccccggcaattttctgtgcaccttctatattcagatcagctacgatcacgtgccctccctcagctgcaaatcggcggcatgctgcactgccgattccgccggctcctccagttatcaacgctacttttcgggaaaattctgcttccggcggggccagcgtgagtttatatagttcgagcggccaatattcgacatggtaggattcattttcatgtaaagaaacaaattgccccagagcggttgctcctttcatcacggcgatggccctccgatataaagccccgcttactttagacatggcataactttttcctgtattcaccattccgattcccggaatcaatatcacccgtggggaggattcaaagatttgatccccatcctgctgatttcgtgtaaagtaagcctgatactctgatgtaaaggtctcgactcctgacttgatcagatctgcaagcttgtgcacatcttgagtttccggattccaatcaatgtacagcggaacccgttttgtgtgaacaaggtgatccgggcatgccgcaccgatttgcgaaagtgctggcgcttggacactgtttacaaattccaagacatcgtcatgatcatcataggaaaggatcattttcttttcttcacttactgctcctctgatcacaggcatgatgcctgccaagatttgttttcttttatcctccggcagcggctgataccttttgcctccgaatacctcatgctgattgatacgatcgttaacatactgctcggcttcttgaatgatggatatcgttttttgataacatgtttcagacgtctctccccaagtgactaagccgtgtttctccattaatataagctcggcgtggggattgtttgctacgccttcagcgatcattttagacaaagtaaatccaggacggacgtatggcacccatacaaaccgatttccgtaaatgtcttcagcgatttgttttccattatccgcacagcatatgctgataatcgcatctggatgggtatggtcaacatgtttgtatggcagaaaagcgtgtaatagcgtttcaattgaagggcggggatgtttgctgtctatcatacaatgagacaggtagtctaccatttcttcatctggcatttggtcccttttaatcagcgggcggatatcatctaatttcaaaccggtaaagttatgcgctttcattgttgccaaatccgaaccgcttccttttacccacatgacttctatttcacggcctctaaaatccttttccgttgttttcatagatgtattccccccgccccagttgcagacagtgcggtctgacccgatcagattggacctgtacaccaattcctctacacctttaggcagccgtgcagctcgctctgaatcccatatatgtttcgccatatttgatattcctccatccccttttatttgtatccgttttcattatatatgatttctgtttgtttttgaattgtttttgtttatttttgcttttaacaaaaaagaaagcagcagatatgccgctttcttgtttcattatgattctattttaaatttcttcgtaatgtcctgaagttcttccgccatgtttgccaacgtttccgctgaagagctgatttcttccatggacgcaagctgttcttccgccgaagctgcgatatcctgaatgcctgctgagctttctttcgccactgcagaaatatcttcaacagcacttgacacttcctgtgatccggctgacagttgttcaaccgtcgcgttcaagttttgcaattcgccggaaatttgggttgtcatctcatagatttgtttaaagctttccgctgtttgatccgtaatctgcaagccttctttcacttcatgattcacggattggaacattgaaagtgaggtgctgatttccctgacaatctcttgaattaatccttcaatttccttggcggagtctgctgattgtacagcaagttttctaacctcttccgcaactactgagaaacctcttccgtattctcccgctcttgccgcctcaatcgcagcatttaatgcaagcaggttggtttgatcagcaatgccattaatcacattcaagatgcttgtgatatcttgcgattttgtttcaaggcccttcacaaccgcttccgctttttgaacggattggtcaattgttttcatctggccgactgtatgctccaccagcttttctccgctgcccgctgcctcagaggactgaatcgatgatttcgtaatggttgaagaggcctgagccacttttgaaatcccctcgttcatttgagaaagatgatttgagcttgtttccagtttctcgctttgtgcctcgttgccatctgagaattgttcgatggcaagtgtaatatgttcagttgccttgctcgtttgggctgcgcttgccgtcagctcctcagaagatgaagcaacgttttctacagacgtttgaataacgccgattacagaacgcaatgatgcagacatttcattaaagctttcgccaagctggccaaactcgtttttcgagtgaatgtcaatgacttctgtgagatctccactgctgatttttgcagacgttgagacaagttttcttaacggcttggtgatggcacggataatatagagaatgagtatgccgccgattacaattgacacgcatagaatgataaccgcagtgttcagcaccggacttgaagcatcttgcaattcactgacaaaatatgtgcctgcgattttccagccagtcagtttatttgtcgtaaaggccattttcttttctttgccttcgaatatatattcaaatgagccttcttttttggaatatacttggtttgtccaatcgccggatccggttgtccccggcttaattgtcggatgggcgatatattttttgttgccagtcgtaataaatgcaaagccttctttaccgattttgattctttgtgatgcagtaagcacttcatccaggtttaaatcaagcgctataacccctgaaccgtcttttaattgttttgaaattgtgacaacgatatctcctgtcgcttcatcagtatacggttctgagaaaacagcttgtcctttttccgcaaccgcctgtttgtaccagtcacgtcctgtcggatcgaaacctttcggaacaccgctatccggatatttataaagcttcttatcttctgaagcagcatagattgcgcctacatcgtcgttaagtgtcgtgtactgcttaaatttctctttcagtaatgttttgtttttgcctaacaatatgtctttatcgactgtctcactataataatctattgcttttactttatcttctaatttattttgcagcgtactgtttagttcttcaacatttcccttcgcactgtttatgagctctctgtctaacgcgttccaagctgattgataactgaaatatgctaaaaccccaaccggcaaaataagcactgccagaaacgcagcgattagcggtttgctgatcgatggctgtttgatccaatgtatgaattttcccattcttgttgactcctcctttaagataaatctaatatcgtcaaactaggataaaaggtttaataaaaaaactaaaaaaaacacccaagcgtaacaagcttgggtgttaaggcttattattcgattttgaatcgtttggtcatatcgcgaagctcttccgccatagacgaaagggtctctgcagacgagctgatttcttccatggaagcaagctgctcttcggctgacgccgcgatatcttgtatatgcgctgaactttcttttgaaatcgatgcaatgtgctcagacgctcccgaaacttcttcggagctggcagaaagctgctgaaccgtcgcactcatattttgcagttcgccggcgatttggttcgtcatttcagaaatgcgtttgaagctcatttctgttttatctgtgatgtcaagtcctgtctgcacctcttgattgacagattggaacatgccgagtgatgtattgatttccttcacaatttcgatgattaatccttcaatctcttttgctgaatctgctgactgtactgccagttttcttacttcttccgctacaacggagaagccgcggccgtactcgcctgcgcgcgctgcttcaattgctgcgtttaaggcaagcaggttcgtctggtctgcgatgccattgatcacacgcaaaatgtttgtaatatctttcgatttcgtttccaatccgcgtacgacttgctccgcttctttaacggacttgtcaatgacattcatttggccgacggtttgatgaacaagcttgccgccttcacttgcaatttctgtcgattgaacagatgaatcagtgatcacttcagaagcttgagccatattcgtcaacccgtcattcatttgataaatgtgctctgctgccgtttcaatgttttcgttttgtttttcattgccgttagaaaattgttcaatcgccaatgtaatgtgctctgttgccttgctcgtttgcgcagctgatgcagtgagctcctcagaggaagcggcaacattatctacggaatcctggatggcgtgtatgagagaacgaagtgacgacgccatattgttaaagcttttgccaagctcgcccaattcatcttttgaacggatatcaatggtttccgtcaaatctccctcgctgatccgcttagaggaaccgacaagctgtttcagcggtgttgtaatcgaccgaatgatcaaagtcatgacgataatccctatgataatagctgcggccaagacaattaaagcaaggtgtaggacaggctgggctgcctcatggatttcatccaaatacatggtgccgccgatcttccatcccgtcaacttgtttgtgtcaaaggccatttttttcttatcgccatccatggtgtattgaaaatcgcctttatcagcactcaacatcttatcgagccagtcgccttttaattcagttcctgatttttcattaggatgagcgacaacttttttgtccttcgtcatgataaatgcgtagccttgtgtgccgatgttgacttttttggttgttttcagcagattttcaatggtcatgttgattgcgataacgcctgaaccatcttttgtctgctgggcgattgtcacaaccatcgtatttgtcgacgcggttttataagggtctgtgatcacgactttccctttatttgcaaccgcttttttgtaccagtcgcgttcaaccggattgtagccgcttggcatcggaagatccggatagcgggtaaagtgcccttttgtgtcacttgtataaatggattctacatccttgttaatgctgatatattgtgagaatttctctgcaatgcttgcattgctttttgcattgtatttctcttttgtcagccattcgctgaaataatcagcactgttttctttttcgccgatgctggtgttaatgatttcgtttaattgctgtacattttccaatgcgctccccatcatctgtctgtcgagtgagctgctagccgattgataggcaaagatcgccaatataacaaccggtatgatgaggatcgacagaaaggaaacaagaagcttccgtgtaattgatctttgttttatgagttggagtatttttttcatcattcatttctccttttttatgctacccttcatatcggctggaaatgggtaaatatatacagcaaaaaagaagaaatttaacaaaagtaactaatttcccataaataaatagtattttagacctattatttatctactttaaattgttttgtcagatcacggagttcttcagacattctttcaagcgtcagtgcagatgaactaatctcctccatggatgccagctgttcctcagctgaagcggcgatatcttggatgccatccgagctttccttagaaatggcagtgatatcatttgaagctgcggaaatttcttgagctcccgatgacagctcctcaaccgtcgcattcatgttttgcagctcggaagcaatttgattggtcatttgcgatatatgtttgaagctctgtttagtttcatccgtcatgacaagccctgtttcaacttctttgtttacggactgaagcacgttcagtgatgtgtgaatttcttttactatttcactgatcagcgattcaatttcttttgctgagtcagccgactgtaccgcgagctttctcacttcctcagcgacgactgaaaagccccggccatattcacccgctctggccgcttcaatggcggcatttaaagccaaaagattggtttgatccgcaatgccgttgatgacacgcaaaatattcgtgatatcctttgatttgatctccagccctttcaccacttgttccgctgattttacagaatggtcaattgtgttcatttggccggctgttttctggacgagtgtctcccctttacttgacacttctgttgaatctgcggatgtttctgtaatcactgctgcagcccgcgccagctctgccaatccgtcattcatttcattaatttgttcggttgtcgtttctattttctcgctttggctttcactgccgtttgaaaattgctcgatagccatcgtaatgtgctcagtggctctgcttgtctggtctgccgatgcagtcagctcttcagacgatgaggcaacgtgttctactgagtctttgatcccgtgaatgagcgagcgaagcgagtgtgccatatgattgaagctctcgctcagaacgccgagttcatcttttgaattgatttcaatcgtttcggttagatcgccttcactaattttttcagcggatgcgacaatgcgtctcaatggctttgtgatggatcgaatcacaaaataaatcgccgtcattccagctgcgatggcaatcgccagaacgattgaagccatgatcagaaccctgcttgcagcatcgtgaatctcgtttgcatacatcgtgccgctgattttccagcctgttgtttcgcttgttgcaaatgccatttttttctttttgcctttgtacgtatattcaaagtccccgcttttatccttgtagagcttatcaacccagtccccttttagctctgttcccgctttttctccggagtaggcgatgactttcttgttttggctcaaaataaaagcatagccttcttttccgatattgattcctttcgcggtagtgactaagtcatcaattttcatatcaatggcgacaacacctgacccatccaccgtttgacgggcgatggtgacgaccatttttcctgatgaaatcgattcataaggctcagtgacaattgttttgcctttattggccattgcttctttgtaccaatctcgttccaaagcattaaagtcacttggcatgtcagcgtacggataacgggtgaattccccgtctttgccgcttgaaaataccgcagcgacattatcattcatttggataaattgtttaaattcctgtttcagctctgttttctttttatcctgaaatttttcttctgtagcccaatcgctgaaatatgcgaggcttttttcagtcgtgctgattttatcatcaatgatgtgatctaatatctgaacattttcctttgcgctttgcgtcatctgtacatcaagtgaggcaactgctgattgataagcgctaaccgaaagggcggttatcggaacaattaagatcagcaggaaagaaataataagtctccttgcaattgatgatctgcgaatagtggtgagtgtttttttcatttccttttgaaccttctttcaataatttacaaattatatcggcggatcttcctttaaattacattgaaaatggaggaaaaaatgaaaaatagttctaaattcacctgttaaactaggactttattattgtttaccatataaaaaacagcgctttgatagcgctgtttttcggcttttactcgattttaaattgtttcgtcagatcacgaagctcttctgccatctgcgcaagagtggtcgctgaggaactgatttcttccatggaagcaagctgttcttcagctgatgcggcaatgtcctggatgcttgccgagctttctttcgacacgtctgcaatgccgctgactgctgctgaaacatgctgtgaacgatctgacagctgctcgacggtggaattcatcgtctgcagcttgcccgcgatttcgtttgtcatgctgaaaatgctctggaagctttcttttgtattgtctgtgacaacaagtccggactgtacttcctgattgacctctttaaacatgtgaagagaggtttcgatttctgcgacgatttcttggatcagcttttcgatttcttttgctgaatcggctgattggacagccagcttgcgcacttcctccgctacgacagagaagccgcgtccagactctccggcacgcgccgcttcaatggctgcatttagtgcaagcagatttgtttggtcagcgattccgttgatgactctcaaaatgcttgtgatgtcttttgattttccttctaagcctttgacaacagcttcagcctgctgaacagattgattaatcgagttcatttgtccgactgtctgctgcacaaacttctcacccgttccggcgatttccgttgattggatagatgcctttgtaatatctgacgatgtttgtgagacttgctggagtccttcattcattaagttcagctgatgagagctggattcaaccttttcgctttgctcctcgtttccgtttgagaactgctcaatcgccatcgtaatatgctcggtggctttactcgtctgcccggcagatgcggtaagctgttcggaagatgcggccacattgttcaccgagtcctgaatagcactgatcagcgagcggagagattgtcccatttcattgaagctttccccaagctccccaagctcatcctttgaatggatttcgatcgtttcggtcagatcccccctgctgatcgttttcgatgattgaacaagatgttttaacggttttgtaatcgaacgaacgataaacagaattaaaattccgcccgccacaatggaagcaatcagcacaatcattcctgtagtcagcacagactttgaggcatccttaatttcatccatatacattgtgccggctattttccaaccagtcagttcgtttgtagtataggtcatctttttatcttcgttattaagagtatactggagttcaccgctgtcattcgcatacattttggctacccagtcgcctgaaagcttttctccagccttatggttcttgtgggcgacataggttttgttttttgttgcaatgaaagcataaccttcttttccgaccttgatttgtttcatttgttctaacaatttatcaatggtaatatccatggcgacaacgccagatccgtccttcagctcctgtgcaatggtaatgaccatgcttccgtcactcgcagccacgtaaggatctgtcacgacaatttcaccgccggccttcatcgcatcctggtaccaaggccgttgtctcgggtcgtatccttccggcaatttttcttttggcgcttgtacataagtgccgttatctgcgcccccataaattctggctactccttgattaatagatacatattgtgaaaatttagctttgatctcttcttgattcgatttccctttgaatgcggaccttttaagagattcactgaaaaaggtgactgctttcgctttttctcccagatcatttgtaacagttgtattaaatgtatcgacactgtttttcgcatttcccataatttcctgatccagctttccgctggcgcttcggtaagagctaaattctaatataagaatagggataatgagaatcgcaataaatgagacgattaatttctttgaaatagacggtttcttaagccaattgataaaagtcttcatgtccacttgctccttcaggtttgatacagtatatatcggctgcttaaaaaagttttaaaataaaaaatggaagaagttctttttggctgtcttctgtcgttttaactttcattgcccaagctctttgcatatcttataaaaaacaaggggggctaaacatgattattgtatcaggacaattgctccgtccccaggatattgaaaattggcagattgatcaaaatctgaatccgctgttaaaagagatgattgagacgcctgttcagtttgattatcattcaattgctgaactgatgtttgagcttaaactgcggatgaatattgtagcagcggcaaagacgctgcacaaaagcggggcgaagtttgccacttttttaaaaacatacgggaatacaacgtattggagggtttcaccggagggcgccttggagctgaaatacagaatgccgccttcaaaagcgattcgtgacattgctgagaacggcccgttttatgcgtttgaatgcgcaaccgcaatcgttatcatttattacttggccttaatcgatactatcggagaagataaattcaatgccagctttgacagaattattttatatgactggcattatgagaaattgccgctctatacggaaacaggacaccactttttccttggagattgtttgtattttaagaatcctgaatttgatccacaaaaggcgcaatggagaggcgaaaatgtgattttactgggggaagataaatattttgcccatggtcttggaatcttaaacggaaagcaaattattgataagctgaattcttttaggaaaaaaggagccttacagtcagcctaccttctgtctcaggcgaccagactggatgttccgtctcttttccgcatcgtccgctaaaaagccccatcgcctattttccggacgatggggtttcaaatgcctttcgttttcgatagaagggggctgtgccgaaatattggttcgcagcccactccattttttcaaggtcatttcttgtcacgattggatcctggctgctccatttgataaagcggacaaaatagtagcctttgataggaaccattgtaacttttgagtgaggccagccttcaaatacaaactcaattttccctctttttttataagagtattgaagaatgttcatatttgtcacctcagtttatcaagttacgttcggcaaagctcggtacgtttacatccattgattgactatccctcatgcatgctttcctgaaaacaaagggtgaggcgcgtgtctctttccctcgctttttatttcgcatatggacgaatgccaagcgcgccttcattcgataaagcggcagccggggcgggtgtgacaagccctccggctatcggcgtttgttcagcgatcatgcttttgtcaaaaaaacagcctattatcccatcattttgatatagcatgtccgggtgcgagggccgtcaaattcgcagaaataaatgccctgccaagttccaagaatgagccggccgttttccacaatgacatgctgtgaagctccgactgtactcgacttcatgtgtgcagctgtattgccctccatatggcggtccagctcatgttcccacggatatacctcatcaaaccttctgagcatatcttttttgacgtccggatcggcattttcattaattgtaatgcccgcagtcgtatgcggacagtaaatcagcgctgcgccgctcgttatacctgtttcttgaagaaacgcttccacctcccgggtgatatcaatcatttcatctcgtttggttgttttgatttgcagtgttttcagcatttgtttctcctttcgtttgtccgctctcatcgcttaattcgttctgtgttcttttttttcctgttaaaccgctctcataaacccgataaaacaaaaaaactccagtctaaggctggagtttagcaccatagatatattcttgcttcatacggctttaagagtactgatgtcatatgcttgtgcggctctgtttcaatatttgacaagacgagtgcatctgatgacaatggcaatccagagtgcctgaacaacgccggtgttcctgtcagattggccgcaatcagtgcagtatggctctcgtttttccgaagatatgcaaagatttgctgatcttccggtaaaatgagctcgtatgtcccgttaataaaaacatcatatgtttggcgcagcttgatcaagcttttgtaaaaatggtaaacggatgttttatcgtttttttgcgcctcggcattcagccatttgtaattctcattgattccgatccacggtttggcctcagaaaatccggcgtatggacctgcattccattgcatcggcgttcttgaattgtctcttccctttttccagacaatcttcatcacatcctcgtgtgatgtgcctttcgctgtttttgtttcatacaggcgtttcattgcgacatcatcatagtcctcaatagagggaaaagccacgttcgtcatcccgagttcctgtccctgataaataaacggtgtgcctttcatgagaaaataaacagcggaaagcgcttttgcactttctttcaggtacactccgtcgtctccccacacagaaactgaacggggctggtcgtgattctccataaacaaagcattccagccgatcccttccagactgtcctgccagtcagttaaaattcgtttaaatgcaacgatatcaatactttcattgatctctacatcccacaggccgagatgctcaaattgaaaaatcatgctgaatatgccgtttttttctccagcccaatcagctgcttcttttgcagcgacgccgtttgcttcaccaactgtcataatcggatagcgggaaaatgtgttttccttcagctctgttaacaaatccataatgccgtcagcattcatatgataaggaaaggaagggacatagtccaatccctttggattcggcatgtcgggaagcccttcttttttcttaatatgcgtaatggcatccacccgaaatccgtcaattcctttatcaagccaccaattgatcatgtcataaacggcattcctcacctgttcattttcccaattcaaatcaggctgttttttatcaaaaaggtgcagataatactggcttgtcttttgatcatactcccaagccggcccgccgaaaatgctttcccaattgttgggcgcttttccgtttttgccgtctttccaaatataccagtcgcgcttttccgagtgtatggatgaacgggattctatgaaccatggatgttcgtcgcttgtgtggttcacaacgagatccataatcagcttcatccccagatcatgaatgtcaccaagcagttcatcaaaatcttccatggtgccaaactcgcttaatatgttttgataatcccggatatcatagccattatcagcattcggtgagtcatacagcgggcaaatccatatgacgtcagcgcccagctcttttatgtaagaaagcttggatctgattccttgaatatccccgattccgtcgccatttgaatctttaaaactgcgggggtaaatttggtaaacaacggtttccttccaccaagcctttttcatacagccactcctttccagtgtaccggtcttatatatcctatgtagaaaaaaggcttcacagcattgctttttaagaaatgacttgatgacacaaaaaacagccgtttgttccccggctgttttttatcaaaaatcagttttttttatttctacaaaacggatgtggtgatcttcggcgtcgaggattttaaattcacagccctccgcgtgtatcacatcccctgctttcagctccattttttgcgttagaagccagcctgcaatcgtatcaatttcttcattttcaatcgcaatgtcgagaaggtcattcacttcgtctattagcgcttttccatccatcacataatggtgctcgccctttttcaggatgtgcggtgtttcatcctgatcatactcatcgcggatttccccgacgatttcctcgataatatcctctacagtgacaagccccgccgttcccccgtattcatcgacaagaatcgccatgtgaatccgctccttctgcatgcggattaaaagctgctgaacaggaatgctttcaatgaccctgataacgggcctcatgatttgctccagctttatcggctggccgagaaaataagctttaaacatatctttgctgttgatgatccctaaaatatgatccttgtcatctttgatgacagggtagcgtgtataccgttcattaatgatgtgatgaattgcctcttcaagcgactgctccagagagataaccgcaatttctgtccgcggaatcataatctctctcgctacccggttgtcaaattcaaaaatcttatttacataacggaattcagactgattaatttctcccttttcatagctttctgaaaggatcagtcttagttcctcctcgctgatgacaacctgatgctcctttactgaatgaaagccaaacaatttcacaagaaaacttgcagagccgtttaatgctttaataaacgggtacgtgattttataaaaccagatcagcggctttgcaatccataagcttacagcttcagctttttgaatagaaaccgttttcggagcaagctcccccatcaccacatgcaaaaaagtgacgatgataaatgcaactacaaatgtgacaatgtggttaaacggttccggcatgcctgtcattgtaaataagggatgaagaaaacgttcaaatgtaggttcaccaagccatccaaggccgagggcagtaatcgtaatcccgagctggcaggctgataaatactcgtcaagattggagatgattttatgtgcggctagcgctcggctgtcaccgctttcgatgagctgattgatttttgaacctctgattttgacgatcgcaaattccgctgcaacgaaaacagccgtaatgccaatcaaaacaaaaatggcgatcaattgtaaaataagcaaaaaaagcccttaccataaatggtaaggggccacctccttaacgttaattctcatcacgaccgtttaagaaaatcatcacaaaacgaagtagttcaaacagggaaaccagggcggcggccacatacgttaaggcagcagcgctcagcactttatttaccccattttcttcattgtttcggatgaatccttctgacacaataatctgcttggcgcgtgaacttgcattgaattcgacaggcaatgtaatcagctggaaaaagactgccgctgaaaacagtatgatgccaagcccgatcaaattcaggctgccgagaagcatgcctcctaagaaaagcaaaggagctacaccggatgcaaaattcacgactgggaagattttatgtctcagcacaagcgcaccatatgactcctgatgctgcaaggcatgtccgacttcatgggaagctacggatatggcggaaattgagcggccgtaatagaccggctcagataaacgcaccacccgtcttgtcgggtcgtaatggtctgttaaagtgcctcttaccggttcgaccggcacgtcgtaaagaccgtttatatctaaaatccgtcttgccgtttctgcccctgtacgtccgcttgaggcttccacttttgaatatttttcaaagttgctctttactttaaattgtgcccaaaacgacaatcccaatgcggctattgttaaaaatataaacagcattttttcatcatcctttttccatgatcatttctctattaagattattttaatgagttttctttcccgtgtacagaaatgcgctttttcttccggcttggagcacagaatccaatcagcaaaaagaacaggcctgctgaaaacaaataaaaggcgaaaccgccggccagttctttcagaaaataaaaccaggagaagctgccggaaaagtgattatatgaattcaaatcgaaaataaacaaaatcaccgcggatgccgccagctgtgtaccgatcaaaaccacgatcgttctttgaaagatcgtcatctttttcatcctttttgttttagtttatggagaaatccggttttatatgttttgtacattttttgaaaaacatcaccggaagtgggacatactgttagaaaaaagcacgggtgtgatggaagctatgaaagtgacgagtgaggaaaaggaacagctgagcacagcaatcgaccgaatgaatgaaggactggacgcgtttatccagctgtataatgaatcggaaattgatgaaccgcttattcagcttgatgatgatacagccgagttaatgaagcaggcccgagataagtacggccaggaaaagctaaatgaaaaattaaatacaattattaaacagattttatccatctcagtatctgaagaaggagaaaaagaatgaaatcaaatcggatatttatttcatggctcaggtggccgttatttatccgaatcggggttattattttatgtctgattcttttgttcggccaaatcatttatatacttgagcctaagcagttcacttcggtattcgaaggcatttggtgggctgtcgttacggtttcgacagtcggttatggagactatgtgccgcacacgccgctgggacaggcagccggaatactgctgattttgagcggagcaagctttgtcacagcatatttcgctacgttatcagcggccgcattcagcagacagcatcgctacatcgaaggaaaagttgcttacaaaggccgggaccacatcattctgatcgggtggaatgaaaaaacaaaccggcttttgaaggaccttcagcttgccgccccttccaaaacggtcgtactaatcgatgaatccttaacagaaggcccgcttattgaaaacgttcatttcatacgcgggcacgctgccgatgatgggacactgaaacgggccaatattactgaagcggaatcagtgatgattactgccgatcagtataaaagtgaaactgatgctgatatgctgtcagtgctgactcttttatctgttaaagggcttaatccccttgcttactgcatcgtcgagattttgactgaccgttttgtcaccaatgcggagcgggcaggtgcaaaccaaatcatcggaacttcagaatttatcagccgggcgatgctgcagcattaccaagtcaagttacggccgtctaaacagcagaacggaatcaagctgacacttgatcagcatgtggagcttcttgctgttcctgacgaactaaagggagcggcttacaaaacctgtgttctctatttccttgatcacaacacaacaattataggcgtacaaaaagaggaggggccgatgatttcccctcctcttacatacaaggtgctcgaaacagatcaattccttgccatctagtgtaacagaacatcctccaattctttcacgagagaggcgccgatatccaaaaatgccggatcaatttccgcgtcccgcctttccggttcggaaaattgattaaacagtgattggaaaggccctccctcggcgtgatcgtcaacatccgcctgaaacacctgtctcagcataaacggcgttccgatccggacggccgcccctcgttcatcgagactgccctgtaccgcattgacgggaattcttaaaaataaatagccgtctctatcatcaattttataatcaaagtagccatgatcgtattcccagccgccgtttatcacataaccgagcggcttcatcacttgttccagttcttgaagcagaaaagactgcccatctatcgcggaaggtattggtatcatcagaatgccccttttttcacttatcctgtcccgccgaacaagacttcattcagaggcgcctacatggaaatcgttgtttctttcgcgcggccaacagaaaagaaagcgcattcaattaagaagtaaacagtcattgccgctgcaagccatacagctgaatcccaagacacataaacaaccgttgcatagagtcctaatttagtgaaaagagtatgggttcgttttaaatgcaaaatccgatgtaccgcatcggtaaaaagggcaagcggcaaaccaatgagaagaaaggcgtggatgaaaaaatgtgaaagcgtgccgccaaagcttgaagaaaactctgtatacacggcatcaaaggagataaggaaacttaaaatagctgcagaaaaaccggcaatgatgagatgtttaaccaattgtttcatgaacatcagcacctttctgattttataaaaagccgaccggcaaatgccagtcagctttctcacattaatcttccagacgtttttcaagctctgcttttttctcttcaaagccaggtttgccgagtaacgcaaacatattgactttatacgcttctacaccaggctggtcaaacggattgacgccaaggaggtaaccgctcatcgcgcaggctttttcgaagaaatatacaaggtatccaaaagtatatgcattcagctcaggaatgttaacgattaagttcggaacatttccgtctgtatgggcaagcattgtgccttggaatgctttcttgttaacgaaatcaacagttttaccggctaaatagttcaagccgtcaagatcgttatccgcttcctcaattgtcagttcatgtttaggtttctctacgttcaggaccgtttcgaataaatctctgcggccttcttgtacatactggcctaaagaatgaaggtctgttgaatagttcgctgaagaaggataaatgcccttctcatctttcccttcgctttctccgaacagctgcttccaccattccgcaaagtattgaagcgccggttcgtagttgatgagcatttcaattgttttgcccttattataaaggacattgcgaacaaccgcatattggtatgctgggttatcttccagttcagatgttgcaaaatctttgctcgcatccagggcgcctttcatcatgtcatcaatgttgacgccgctgacagcaatcggcaagaggcctacagctgttaaaactgaataacggccgccgacatcgtcaggaataacaaatgattcgaaaccttcttcgttagaaagcgtttttaatgcgccgcgctctttatcagttgttgcataaatccgcgctttcgcttcttctttaccgtatttctcttcaagaagcttgcggaaaatacggaaagcgattgcaggttcagttgttgtacctgatttagaaatcacattaatagagaagtcaacatcttcaagaagatccatgacgtctctcatataagatgaactgatgttgttcccgataaaaatgacttgcggattgccgcgttttgcttttggcaaagtgttataaaacgcgtgattcagcgcttcaatcgctgcccgcgctccaagataagaaccgccgatgccgacaacaagcaagacatcagagtcagatttgattttttccgcgctttttttgatgcgcgcgaattcttctttatcataatgttcagggaggtccacccagcctagaaaatcgctgcccgcgcctgttttttcatggatattatggtgtgctgtttttacaaagtcccgcaggtatgtaagttcatgttcgttgaagaaagtcaacgcttttgagtagtcaaagcgtacatgcgtcattgcttgtccctccataacggtataatgttttcatctttcactttatatgaacttatctgtgaaatcaagtcaagaagaaagggcggaatgactggattccgccctttgggtttatagagacgcgcgaaggatggcaagcacgtcatctttgttcagtttttggaagttgccgaagcccccgtgttccatttccttggctgcgatatcagcaatcagttcaagcttttcttctccaatattgtaatcagcaagacgagaaggtgcaccgaggcttgtccagaacgcagacagtttatcgattccttcaagcgcaatttctttatctgttttgccttcagtatcaatgtcaaacatgttgagcattaggtttttaaaacggcctacatttgtatcaagcgtgtatctcatccagtttgggaacagtatcgccaaaccgcccgcgtgcggaatatcatatacagctgaaacagcgtgttccattgtatgagaagcccagtcaccaaagtagcccatttggagcgtgccgtttaaagcaatagtaccagcgtacaaaatcgtttcacgaagtttgtagttttccagatcttcaagaagcttaggagctgtttcgatgaccgtctgcaaaacagcaaagcacattctatcctgaagcggcgtgttttcaacattatggaaatattgttcgaatacgtggctcatcatgtcaaccatgccgtatactgtttgattttctggaacggtgaacgtattttcagggtctaaaatagagaaacgcggatgagtgacattgctgccccatacaaatttctcgtttgtttcccagtttgtaatcacggaatctgggttcatttcagaccctgttgcagcaagagttaaaacagtgccaaacggcagcgcatcctccgctgttacttttttgctgaaaatatcccaagcgtcgccatcgtatttgacgccagctgcgattgcctttgtacagtcaatcacactgcctccgccgacagcaagcagaaaatcaatgtcatgctctctgcaaagtcctatgcctttttccactgttgcaagacgcgggttcggctctacacctgacagctcatgaacaacagcgccctcttcttttaaaatgcctgtgacttgatcataaaggccgttgcgtttaatgctgccgcccccgtaaacaagcagtacattcttgccgtattgtttgaattcttttcttaattgatcaagctgaccttttccaaaaatcagctttgtcggattataataagtgaaattttccatagtaaaacctccaaatgatgctggtaaaaaacagattttccattgtaacataagttgacaaaaagaaaaagggaagcagccaaacggctatttcccctttttttatagagatgctttcaaaattgaaagcacatcttctttgttgagtgatttaaattggccgaatgtaccgttagccattgccttgtcagcaattgtgtcaagctgctcatcattaatatcataatcagcaagacggttcggagcgccaaggcttgtccagaatgcggacagcttatcgataccttcaagggcaatttcttcatccgttttacctgcttcttcaacatcaaacacgcgaactgcaagctgtttcatgcgggcagggttttcagacaatgtgtgtctcatccagttcgggaacaaaattgccagtccgccggcatgcggaatatcataaacggctgatactgcatgttcaatattatgagtagcccaatcccctcttgcccccatagaaagcatgccgtttaatgcgattgttcctgtgtacaggatcgtctcacgcaattcgtaattttcgagatcattgatcagcttaggcgctgtttcaatgactgtacgcagaagtgattcacacatgcggtcctgatacggcgtgtttgatacatgatggaagtattgttcgaatacgtggctcatcatgtcaaccatcccgtagatcgtgtggtttttaggtactgtgaatgtattcaccggatcaagaatcgaaaatttagggaatacgagcgggctgccccagccgtatttttcttttgtttcccagtttgtaataacagatcctgagttcatttctgaaccagtcgcagcgagagtcaataccgttccgaatggcaaagcatcttttggctgatgctttttcgtaacgatatcccacgcatcaccatcatactttgctcctgcggcaatcgcttttgtacagtcgattacgcttccgcctccgacagccagcaagaaatcaatgttttgttctttacagatggcaacacctttattaacagtcgacacacgaggattcggttccacacctgctaattcatgcacggtcgctccggctttattcagctgttcaatcacttgatcatacaggccgctgcgtttaatgctgccgcctccgtacacaagcaatacgttttttccgtaaggtttgagttcctccggaagtctttccacttcgccgcgcccgaaaattaatttggtcggattccagtatgtaaagttttgcatgacatctcctccttagattttttattatgcagaatgtcctcaccacatgtaaagcaatcagctctcaccgatcagcataccagatggttttattttgcaagatgctgggaaagaagctgatataagcgagggcaggccagcctcatatggagaatgcatgtatagattctccaatatgtcacaatctataactgttttaataattcatggaggaggttgcaaaacatgagtaccattcaaagaatttgtcttgtattaaccatcattggcgccattaactggggactgatcggatttttccaatttgacttagtagcggctatcttcggcggccaagggtcagctctttcccgaatcatttacggacttgtcggaatcgccggcttaatcaacctcggtctgctatttaagccaaacgaggaaagatcacgtgaagaagcagcaaatcctgaaatgcgataggatatcaatcacgctgaaataggattttgtattaaatcaaaagcaccgaacattcctgtccggtgctttttttcatgcttattttttgataaggtctttgcggttggacatttcgatccactcttcaagcttatcttttaatgtgttgaaaccttgtggtgtagaagcttcttcgcttacttgagcagctttaggttttcttggtttgctttcttttttctcaggcgcagcttgtgtcgcacgaattgaaaggctgattttgcctttttcttcatcaacagcaagtacttttacttgtacttcgtcgccaactgaaaggtgctcgttgatatcttttacgaaaccgtgagtcacttcagaaatgtgtactaaaccttgagtttcttcatctaatgcaacaaacgcaccatacgcttgtaatcctgtaactttaccagtgtaaacactgcccacttcaaattttgctgccattcataacaactcctaagttaaattaaatatctgtttatacgcaatttaaaattatatcacacatgtcttatttccgcaaagaaaactttttcataaaaaaatcaggtttatgcacagcaaaaagggggtaaactgaaaataccaaaggctttctagtattcccccttttattggatgcgaacaaaaggttcgtatctttttttatattgttttgtgcaggaagcgtttcattctgactaacgcttcttgaagctgttcaatcgaggttgcgtatgaacaacggatatatccctcaccgctcggaccaaacacacttccaggaacaacggccactttttcttgcgtcagaagctcctcggcaaactgttctgaactcatccccgtgcttttaattgatggaaaagcatagaaagcgccgcccggatgatgacagctgagaccgatttcattgagcgattctacaaacagattccgtcttcttcgatagctttttttcattttttctacgtcttccatgccgttcttcaggccttcaagggcggcaaactgcgccattgcgggcgcacacatcatcgcatattgatgaattttaagcatggcatcccgaagcaaggatggtgccgcggcaaaaccgagcctccagcccgtcattgcaaatgcttttgaaaagcctgagatgactaccgtccgttccttcattcccggtaatgccgctatacttgtaaattcctcatcatatgtcagctccgcgtagatctcgtcggctaagacgatgacatcatgttttttggcaaactcagcaatctcattcagctcttccttcgaataaaccgaacctgtcggattcgatggtgagcagatgagaatggcctttgttttttcagtgactgccgcttcaaaatcagcagccgttgctttaaatcctttgtctgccgttgtatgaacgtgaaccgggataccgcctgccaaagaaacaagcgcatcatacgccacaaaacacggctcaggaatgatgacttcctcacctggattcacaatggcgcggatcgcaatatccaaagcctgacttgcccccactgtcacaatcagctcattatctggcgagtagctaagatcaaacctgttgctcaaataacggctgatttcctcccgcaatgagtataaacccgcattggccgtgtatgacgtatatccttgttcaagagagagaatgcttgcttcgcggacattccacgcggtaacaaaatcaggctcgccgacgcctaaagaaatgacgccttccatcgttgccgccaaatcaaagaatttgcggatgccggatggttttatttgttgtacatagtctgataaatacgaagtcatttacggtgacaccacgattcttttgtcgtcgtctcctgtttcaaacactttgccgtcatgcttgtattttttcaggataaaatgggttgtcgtagatacaactgaatcaagcgttgagagtttatccgaaacaaaacgcgctacgtcagacatcgaattgccgcgaatcacgacagacaaatcgtatacgcctgacatcaggtaaactgattcaacctcttggaatcggtaaatccgttccgccacttcatcaaaaccgacgccccgcttcggcgttactttgacgtcgatcatggccgtaacgccctcatgtccgtctacttttcgccaatcaatcatagcggaataatcgataataaccttttctttttccagtttgtcaataattgtttttacttcatttacagggatgcccgccatctttgcgattgtttctaaatcggcgcggctgttttcgtctaaaatttctaatatttctgtttctttttctgtcagtttcatttgattcacacctttgcaatgtcaagaaatctcatgacattatatcacgttttttgacgaatgctaagaaaaaacgaggagaaacttccgctagaatttacaatttcagggcataatacaaccatcaaaaaaagggagtgacacagaatggaggcggtttcaccaataaggcggtttacggtcgatggagtcaatgtatactacgaacattatcaaaatcccggcaggcaaacgctggtttgcgtacacggttttttatcatctgcattcagcttcagaaaagtaattcctctccttcgggacaagtacgacatcatcgcgcttgatttgcctcctttcggccaatctgaaaaatcaagaacgtttatctatacctatcaaaaccttgctaagcttgtcattgggattttggagcacttgcaagtgaaacaggctgtgcttgtcgggcattctatgggcgggcagatatcgctgtctgctgctctccaaaaacctgagcttttttcaaaggttgtgctgctttgcagttcagggtatttaaaacgttcacacccgacgatcattttcgggacccatatcccgtattttcatctttatatcaaacgctggctctcgaaagaaggcgtgatgaaaaatttattaaatgtggtgcatgacaaatcgctgattgatgaggagatgattgacggctatggcagaccgtttcaggacgagcagattttcaaagccatgacaaggtttatccgccacagagaaggagatttagaacccgagcaattgaagaaaatgaacaagcctgctctattgatttggggcgaggaggatcgaattgtcccaatggagatcggtaaacggctgcacgcagatttgcctaattccgtgctgtactcacttggccagaccggacatctggtgcctgaagaacggcctgaacttgtttctgaacacattgctgattttatcaattaaaaaaaccggtgctgaaccggtttttttaaggcgtgcaggagctgctgtttttaatgaataaaagctggccagccacttcccggcagctgtcgatcggcagcgtttgttcaaaagaagtttcaaatatttgctgaatgcttttcgccagcacgtcaggatcgtcttcatcatagactgcctgcacgacatcaacagcctccgtttcgtaaaactcttctccatatttaaacgggtcccatttggcaatgatcttaatcatttccctgaccgcttgactttcttccatattcatcaccgcttataataaaatttgcagttctatcttatcatagtgaagcttagaagaataaacatacatgagggggtaacagaatgaactttgataaacgagaagaacgccttggcacccaatcggtcaaatgggacaaaacaggcgaattatttggcgtgacagacgcactcccgatgtgggtggcggatatggattttcgcgcgccagaagcgataactgaagcgttaaaagagcgtcttgaccacggtatttttggttatacaactccagatcaaaaaacgagggatgctgtgtgcggatggatgcaaaacaggcacggctggaaggtgaatccggaaagcatcacattcagccccggcgttgtaacggctttgagcatggcggtacaagcttttacggagccgggcgatcaagtagttgttcagcctccagtttatacgcctttttaccatatggtggagaaaaacggccggcacattttacataatccgctgctagaaaaagacggcgcatatgcaatggattttgaagatttggagacgaagcttagtgacccaagtgttacattgtttattttatgcaatcctcataacccttctgggcgttcatggggccgggaagacttactgaagctaggcgaattgtgccttgagcatggcgtcacagttgtatcggatgaaatccattctgatttaatgctgtacggacacatacacacgccgttcgcttcgctctctgacgatttcgctgatatttctgtgacatgtgctgctccaagcaaaacatttaatatcgccggattgcaggcttcagcaatcattattccggatcgcctgaagcgcgccaagttttccgcaagccttcagcgcaatggtttaggcggactgaacgcgtttgccgtcactgcaatcgaagccgcgtattcaaaagggggaccgtggcttgatggattgatctcttacattgagagaaacatgaacgaagcggaagcctttttgagcaccgagctgccaaaggtcaaaatgatgaagccggatgcatcatacttgatttggctcgacttcagcgcttacggcttgtccgatgcagagcttcagcaaagaatgctaaaaaaaggaaaagttattttagagcccgggacgaaatacgggcctggcggagaaggatttatgcgcctgaacgcaggatgctctcttgcaaccctgcaggacggcctgcgccgcatcaaagccgcattatcgtaaatatagctgttaaacgcctttacgtcttcatttgtaaaggcgttcttaataaaggaattttatattttacttctaatatttagtgttataatagattcatattttatacgaaaggatttcacacgaatggaaattctaaaagactatcttctgcacatctgctttattttgtttcctattcttctttaccaagtgttttggcttggaaaacctgcgattcttgtgccaaaaataaacagcggtttggtcacgctcttcgcctgcggcgcctccgttttatgcattattttcccgattcatgaaatggactacatacaatacggccttcagatgattcccgttatcatttgtttattttacattagtaccgcttccggacttacagtcgccgcatctgtcctatgttttgaactgcttttttacgaaccttccgcaatgtttgttttcactttgctgccttttcttatcattatcccaatcttatttcagaaaaaatggccattcatgtccaaagcgaaaaaactgctgctgtctttattgatcagctgcgtggagattttcctatttttcgcctcaagctggattctttccgccttgaatattttaaattttcaaaaatcaggaattttcgtttacgaggcggcagtctcagggcttttccgctccagtgttcttctattaagcatctatattatcgaaagcatcgccgaaaatatcgccctgcgctcacagcttatccattctgaaaaaatgacgattgtgagtgaactggcagcgagcgtcgctcatgaggtcaggaatccgctgacagttgtccgcgggtttgtccagctgctttttaatgatgaaaccttacaaaacaagtcgagtgcagattacaaaaagcttgtactgtcagagcttgaccgggcgcaaggcattattacaaactatctcgatatggccaaacagcaattatacgaaaaagaggtttttgacctatctgcccttatcaaagagacaagctcccttatggtgtcgtacgccaattacaagtcagtaaccgtcgaggctgaaacagaaccggaccttttgatatacggagacgcaacaaagctgaagcaggctgtcatcaacctgatgaaaaacagtattgaagcggttcctcacggtaaggggatgatccacatatcagccaaaagaaacggccatacgatcatgatcaacatcacagacaatggggtcgggatgacagaccatcaaatgcaaaaactcggcgaaccttattattccttaaaaacgaacggaacgggactcggcctcaccgtaaccttttccattattgaacatcatcacgggaccatttcatttaacagcagcttccaaaaaggcactacggtgaccattaagcttcccgctgatcttcctcactagcaaatcgattggaactttaatagaataaatgcgaggtgatgacagatgagcacgtttgagacaggctctatcgttaaaggattttacaaaacaggtgtatacataggagaaatcacggcttgcaggccgcagcattatttagtgaaagtgaaagcggttcttacccatcccgctcaaggagaccttcatcatccaaaacaggcggatgtgccattttttcatgagagaaaagcgctcgcacatggtgaacagaccaatatcccccaccatatggtgaagccttatgacggtgaagtgccggattataccgaatctctgcgggaggcgacagcacagctgagagccaaattggatgaggatggttcggagtgggcaaaacgctcccttcataatctggacattttagaaaaagaatattttaacctgccataacccagtctgacaaaagattgggttttttacgtcgcgcgcttcaacagttcggttaaatcgattctctcgccgattgtgggcggttttggcttttcgagatactgcttatcctgctcaacaagcttaaaaagtttatatgctgtaagagcatcatcaagcgctttatgatgggtgccggttccggaatctccatactcttcggcagctttccataaacccgtcaatgtccggtctccaaaaaagtttttgtattcaagcgataaatctctcatttctcccttaaacgggaaagggatatggttaaacatacagttttgcttcagcactttcatatccatgtttccccacgtaataattgtgctgtttttctcaggatccagctcgtttagtttacggatgaaatcctcgaatctcattccttcgtctacctgtttttgggttatttttaaaaatgatttgcagcgtttcgtaagcttcgggaactttttcggtctaacatagctagaaaacgtctcaaccacttcatcatcaatcgactttacaattccggcttcaatgatttccgggaagaagttttgaggactgtactttccgtcaggcattgtaaattcgaaatcaataatgagtaagctgtttgtcgtcacctttttacacctgcctttcctccgatcagaaaatgctatctttatagtatatcaattccccttctcgacatttcttcattttctaaaaataatgaattttcccagccgcttcgtttcttttaaattgtgaatcgtttctttataattagtaaggaacccgaaataataagaaggtgatgttatttctatccgtaagaaaaactttgtcattgtgtggctggcgaacttttttgtctccgctagcacaacgatgatcgttccttttctctccttatacattgagacgctcagctctttttcaaacggctttgtgcaaaggtggagcggctatgtgttcggcattacatttctcatggcgttcttggtatccccgttttggggacggttcggagacaaacgcggatataagaaaatccttatggcaaccggaacgggcattgccctcagcattttcttcatgggctttgttacatcggtgtaccaattgttttttctgcgtatggcaatgggtcttgtaaccggattcatcccgacatctcttgcgatgatttcggcacagactccgaagagctcagccggcaaaacactcggcacgctgcaaatggggcaagtgtccggaagcttgttcggcccgcttttgggaggcatgcttgctgatcgtttcggctttacgtataccttttttatcacatcctttgtgattttctcgtctgttcttctcgtgttatttggtgtcaaagaaaagcctcttgcagagaaaacagccaaacgtacgtcttactcgaggaaagaagtgctatcctatatttttcaccagccggcgctgtgggtcatgatgctgttaaccatgctgattcaaacaggcaatttcagtatccagcccctgctcgctttatatgtaaatgagctgcatggacctgtcaatcttgcctttttctccggcatggcattttcagcaacggggctcggaagtttgctgctggctagaaaatggggtgatctgggcgaccgctacggccaccgccgcattttaatcggacttttgctcgccgcctctttcttttttattccgcaggcgctcgcgtcctcactcagcgtgctccttgttttcagatttttattcgggatggcgatgggcggtttgctgccatgcattacggcagcgatccgcgttcaggctcccggcagcattcaaggtgaagttctcggctacaatgtcagctttcgctttttaggaaacgtgctcgggcctctgctcggcggaatcatatcgagccattttaccatttcggccaccttttacgtcacggcgtttctctttttcgccggcgcctgcatgctttggatcatgcagaaacttcggaaagattcttatgccaaagcaagctgattccgagaaaaaactgaggaatcttctaaatttaaccttctcgtaatctcaaaagaatggtacgatatggctagaatttaggagaaaagagagtgaccatgttacgaaaaataatcggatggattttgctcctttgcataatcccattgtttgcatttacagttatcgcttccggaaaagaagtaaaacaaatgaagtccctggatcaggtgcttgataaaaatattaatctgaaagatatcagccttgttcagaacagctacatgtatgacagggacggctcccttgtctcggaaatcgtcagcgaccacgaaaaccgtgtgctcgttccatttaacaagattcccgaggaagtcaaacagattttcttaacatctgaggaccgccatttttacgagcataaaggctttgactttatgggaatggtgcgggctactgcttctaacgtaaaagacaagaaaattgaccagggtgccagcaccatcacacagcagctttcaagaaacttatatttgagccacgaacgctccttcagccgcaagctgacagagctcgcgtattcctatcagctggagaaaaaatatacgaaaaatgaaattcttgaagcttacttaaataccatttattttaacaatggtgtttatggcgtcggttcagcagctcaattctatttcagcaaaccgctgaaatctctcacagtgggagaaatggcttttatctgtgctatacctaataaccctacattatatgatcctctcaagcattttgactacacgaaaagccgtcaagaacgtttgcttaaagggctaaaagatgccggggtcattacggacaaagagctgaaaaaagccgtaaaacaaaaaatcaaactggatgttgaaaaaagagaagacaaatatcctgactacgtttcctacgtcaatgatgaattcactcagctggtgtctgaatcagaaggctttgataaacgccttcaaaaagcatcaggaaaacaaaaagaaaagatcgagaacgagctgtccgcaagagtcagcactctgatgaaagacggcgtgaaaatttatactgcacttgatccgtacatgcaaaatcaagttgtggcacaaatgaattccaagctcccgtatgcggacgtacagggcggagcggctgtgattaatcaccagacgcatcaaatcatcgctctatccggcgggaaaaactatcaaaaatatgactttaaccgcgcctaccaggcgtacaggcagccgggttcatccattaagccgcttcttgattacggcccttatattgaacagaccggcgcgacaacaagcagcaccattgatgccagcaagttttgcagcaaagactactgtccgcaaaactacaataaccgcacttacggcacagtgacgcttgatacggcgtttaaaaattcatataataccccggctattagaatgctcgaccgcgtcggcatccaaaaggcattcagttatattgagccgtatcattttgccaaacttgtcgacagtgactatcttcttccggcggcgcttggcggatttacaaacggcatgacgcctcttgagatgacaaaggcttatacgacattcggaaacagcggaagctatacgccgagccatgcgattacaaaggtgacagaccttaaaggaaaaacactttataaatggaatgataaagcgactcaaatattcagcgtccgcacgaacatgcagctgaaaaaactgatgtcttccgttgtgaaaagcggaacagggaaaaaagcatatttcaatgcgccttacatcggcggtaaaaccggaacatcaaatgattatcacgatatgtggtttgtcggcctgactgatacgtatacaatgggtgtctgggtcggaaaggatacaccgaccagcgttgaatatcttcacagcatcagccctcagctttccatctggaaaggaacgctgcaagcggcttattaaaggatcggaggggatatggagtgacttcagaacaaattccaaatcgcgttttgctgtttgacggtgtctgcaatttatgcaatggagccgtgcagtttatcattaaacgtgatccggacggattgatttctttcacatcgctgcagtcggaaacaggacagagcctgctgaaaaaaagcgggcttccgactgatcggtttgacagctttgtctttattgaagacggccaagtgtacacaaagtcaactgcagccattaaggttttcaggcatctgcgaggcccatggcggctcttcgtcctgtttttcgcagtgccgaagcctgtcagagatatggtctattcttttattgccaacaaccgctataagtggtttggcaaaaaaaatgaatgtatgctcccctccccttctattaaaaaaagatttttaccgtaaataaaaaatggctaggaagctagccaacacagattgttgacaaaatcctaaaacggcttcgttttaggattttgtcatcttttcagcgtgattgaaaacctttgaagtcgacgaagagcgagcattggatgtgaaacggcaggaacctgagaatctagccgccgttttattgcgtacagagcacgaagcgcaaatctgaccactaaacgctgaaatggctagcttacacaggtaagctagccattatgctattataaagcttgataaatatgaacagaataccgataacaaaggtaaaccaaaacagcagttccaatagaatgaatccaactaatgacatgagagaaagcgtcgaataaatccggtacacggtaaacacaaagtaagcgagcgtgacgaccgcaaaccagatcacaatccaaatgacattttgcaagagcacaaaggataaaatcccgccgcccaaataaatcatggaacccattctgagttttttcaggttgttcccttccggatcattagcaaaaaacagcaatgacagctcggtcacggtatttgcaattaatttcagagcggacagaaccataaaatataaaagtgcaaaggcagcaaataacgcaagcctgattcctttctctgaaaaataatcgagcattccatcatacattccaaatgaagacagcatcttcaacgcataaagtgaagttgagatggataaggacgaactaaaaagcaggatcgcaatcagcggaaaatatcctgtcaaataagtatttttcatataaaaaagtccctttctataatctacctcatttattatggaggacttaaaacacattgacaagataaattattccattttttctcctttttacgaattacggtcccaaatcttcacaaagcagcattttgagagtaaagtagtacgcaggaatcataaaacgtaaggaagttttatatgaaaaaaacattaaaactgcaaaccagactcaccatatttgtttgtatcgttgtattaatcgcattgctcattacgttttttacagtcggtgcccaaaccaccaaacgaattagagatcaggaaaaggccactgcgctgcagactgctgaaatggtagctgaggcgccgatgacagccgctgctttagaaagcggaaaaaaacaaaaggaactgcagagctacacaaagcgggttcagaaaattaccggcacggaatttgttgtcgtcatggatatgaacggtatccgcaaaacccatcctgacccgagcaaaatcggaaaaaaattcagaggcggtgatgagtccgaggtattaaaagggcatgtccatatcagcacagcctctggcacgctcgggaaatcgcagagagcgttcgtccctgtctacgcggagaatgggaaacaagtcggtgcagtcgcggtcggcatcaccgtaaatgaaattgatgaagtgatcagccatagcttacggccgctttactttattatttgcgtcagcatcttcgtcggtgtgatcggagccgttatcgtcgcccgtacagtgaaaaatatcatgtacggacttgaaccttatgaaattgcgactctgcttgaagaacggagcgcgatgctggaatcgacgaaggaaggaatactcgctgtcgatgaacatggcaaaattaaacttgccaacgcggaagcaaaacgcctattcgtcaaaatgggcatcaacacaaatcccattgatcaggatgtagatgacatcttgccgaaaagccgcttgaaaaaggtcattgagacaaaaaaacctcttcaagacagagacgtccgcattaacgggctggagcttgtgtttaatgaagttcctatccagctgaaaggacaaactgtcggagcgattgcaacattccgcgacaagaccgaggtaaaacatttagctgaacagctttccggtgttaaaatgtatgcaaacgcactgagagcgcagtctcatgaatttatgaacaaactgcatgttatattaggtctcgtccagctgaaagagtatgatgatcttggagattatattaaagatatagccatacagcaaaaatcagaaacaagtgaaattataaatgatgtcaaaagctccgtactggccggttttctgctcggaaagcaaagctttatacgtgagcagggcgcaaatcttgatattgaatgcaacggtgtcatcccgaacgcggcagacccttctgtcatccatgaacttattacaatcatcggaaatctcatcaacaatggcttagacgccgttgccgatatgccgaaaaaacaaatcaccatgtccatgcgcttccataacagcatacttgatattgaaattaccgatactggagcaggcatgtctgaagaagaccaagccaaagtatttgaacaaggctattcaacaaagggcaaaaaccggggattcggcctttatttcacacagcaaagcatcgaaaatttaaaaggccaaatgatcctcacaagcgaaaagaatgaaggaacgacattcagtattcgcatcccgtacgaaccgaaggaggaaaatcatgattaatgtactaatagttgaagatgaccccatggtgggtgaattaaataaacgatacttaagccaaatagatggctttcagctgaaaggcatcgcttcttcctttcaaagcgctctgcatattttaggcgagcaccatatcgacctcattttgcttgatatttatatgccgggaaaaaacgggctggaactgctgacggaattgagagcccaaaatgaagcggttgacgtgattgtcatctcagcggccagcgagcttgacgtaatcaagaaaacacttcggtacggagctgtcgattatttaatcaaaccgtttgaatttgaacgtttccaaacggctctgtctgattacagacgaaaacaaaaggtgtattcaacccatcgcaacatgagccaaaaagaactggacgccgagctttttcaaaagaaagaagcaacagaaaaagtgcagcttcctaaaggcctgacaaaaagcacgctgaagctgatctggtccagtatccagtcatttgaaaatgaatcttttacgacagaagacttggcaaagcacacagaaatctctcaagtatccatacgaaaatacttaaagtttcttgaagatatacaagttctgaatgtagaaatggcgtacggaacgatcggaagacctgtgtttcagtacaacgtaaacaacagtaaccttaacggaataaagcaatatctataagaaaacgcactgcttgctttgagcagtgcgtttttctgtcatatctcttgccaagatgcttgattctattgttgataagttatacaagaataacaaagggctttcacatttttaagcaaataattctaaaaatagatactttttaaaaaattatgcgaaattctatttatttcttattagttaaatgataaattatgattggttagttgatcccgaaaaactaagtcataagtcttacttcagaaaacgatgtcacggttttccgcccggaacgccttccgcatccttctcttccccgcctttcgaaggaaatactcacaccacgcttattcagggaagaatagaactgtctcagcgcattccatttgttattatcagaaaattttatcgattctaagaaattgttcaggacagcccatcacatgactggccggatcagctttgaaccaaatttttctggggggttatatcttgaataaacgaaaaatcggattggcgatgtcacttgtgatcgcagcaggcaccatattaggagcatgcggaaacagcgaaaaaagcagcggctcaggcgaaggcaaaaacaaattcagtgtggcgatggttactgacgtaggcggagtggatgacaaatccttcaaccaatcagcctgggaaggcatccaagcctttgggaaagagaatgggctgaaaaaaggcaaaaacggttacgactatcttcaatccaaatcagatgcagactatacaacgaacttaaataaattggcgcgtgagaattttgacttaatttacggcgtcggctacttaatggaggattcaatcagcgaaattgctgaccagcgcaaaaatacaaactttgcgattatagatgctgttgtcgataaagacaacgtcgcaagtattacgtttaaagagcaggaaggctcatttctcgtcggagtggccgcagccctatcaagcaaatcaggaaaaatcggctttgtaggcggcatggaatcagagttaatcaaaaaattcgaggtcggcttccgtgccggcgtacaagcagttaaccctaaagccgttgtagaagtgaaatacgcaggggggttcgataaagccgatgtcggcaaagcaaccgccgaaagcatgtataaatcaggcgtagatgttatttatcactctgcgggcgccactggcacaggcgtctttactgaagcgaaaaacctgaaaaaagaagatccaaaacgcgatgtctgggtcatcggtgtcgataaagaccaatacgcagaaggccaggtagaaggaacagatgataacgtcaccctcacttccatggtgaaaaaagtagatacagtcgttgaagatgtaacgaaaaaagcgagtgacggaaagttcccgggcggcgaaacacttacctacgggcttgatcaagacggagtcggcatttctccatctaaacaaaatctatcggatgatgtgatcaaagcggtcgataaatggaagaaaaaaatcatcgacggattggaaatcccggcaactgagaaagagctgaaaaccttcaaagctgaataagaatcgcagggataaggaggtcgagcccttatcccttgtttttcttttattttgaaataaaggagcggtcaatcaatggaatatgtcattgaaatgctcaatatccgcaaggcgtttccaggtatcgtcgccaatgacaatatcaatcttcaagtcaaaaaaggcgaaatacacgcgttgctcggtgaaaacggagcggggaaatcaacgttgatgaatgtccttttcgggctgtatcagccggagcggggtgaaattcgggtgcgcggcgagaaggtgcacatcaacagcccgaacaaagcgaatgaacttggaattggaatggtgcaccagcactttatgcttgttgacacctttacagttgctgaaaatattattctcgggaaggagccaaagaagtttggcagaattgaccggaagcgtgctggccaagaggtgcaggacatttccgatcgatacggcctgcagatccatcctgaagcaaaagcagctgacatatcagtcggtatgcagcagcgcgcagaaatattaaaaaccctctaccgcggtgccgacattctgatttttgatgaaccgacggctgttttgacgcctcatgaaattaaggaactgatgcaaattatgaagaacctggtcaaagaagggaagtccatcatcttaatcacccataagctgaaagagattatggagatttgtgaccgcgttacggttatccgtaaaggaaaaggcatcaaaacccttgatgtccgtgatacaaaccaagacgaactcgccagtctaatggtcggccgcgaggtatcgttcaaaactgaaaagagagctgctcagccgggagcggaagtgcttgcgattgacggcataactgtaaaggatacccgcggaatagagacagtcagagatttgtctctttctgtcaaagcgggagaaatagtcggcatagcaggcgtcgacggaaacgggcaatcagagctgatcgaagcggtgacaggactccgcaaaacagattcaggaacaatcaccttaaacggaaaacagatccaaaacctgacgccaagaaaaatcactgaatccgggatcgggcatattcctcaggatcgccataaacacggtctcgtccttgattttccaatcggagagaatatcctgctgcaaagctattacaaaaagccgtattcagcattgggcgttttacataaaggcgaaatgtacaaaaaagcacgcagcctgatcagcgagtacgacgtcagaacgccggatgaatatacacacgctcgggcattgtcaggcggaaaccagcaaaaagcgattatcgggcgggaagtagaccgaaatcctgatttattaattgccgcccagccgactcgcggccttgatgtcggagcgattgaatttgtccataaaaagctcattgagcagcgtgatgccgggaaagccgttcttctcctctcgtttgagcttgaagaaattatgaatctcagtgacagaatcgccgttatttttgaaggacgcattatcgccagcgttaatccgcaggaaaccactgaacaggagcttggtctcttgatggcaggaagcacgcaaaaggaagcggggaaagcaaatggttaaacgactctctcatttactcgtgccgctcatcgcaatcatccttggtcttgcggccggcgcgttgattatgcttgtgagcggctacagtgtggctagcggatattcggctttgtggaatgggatattcggagaaatctattatgtcggagaaacaatccggcaaattacgccttatattttatccggattggctgtcgcctttgcattccgaaccggactctttaatatcggcgtcgagggacagctgctcgtcggctggacagcagcggtttgggtcggtacggcgtttgacggaccggcatatattcacttgccgctcgcattgattacagcggcagctgcaggaggattatgggggtttattcccggcattttgaaagcgcgattttacgttcatgaagtcattgtcaccattatgatgaattatatcgcgctgcacatgaccaattacatcatttcaaacgtcttgacagatcatcaggacaagacggggaaaattcacgaatccgcctccctccgctctccttttcttgaacagatcaccgattactcacggctgcatttgggaatcatcgttgcccttctcgcagcagttatcatgtggtttatcatcaacaaaactacaaaaggatttgagctccgggcggtcgggtttaaccagcacgcttcccagtatgccggcatgagcgtgcggaagaatatcatgacctccatgcttatctccggcgcttttgcaggccttgccggagccatggagggcctagggacattcgaatacgcagcagtgaaaggcgcatttaccggcgtaggctttgacggtatcgctgtcgctcttctcgggggaaacacagccgtaggcgttgtactggcagcatgcctgcttggcgggctgaaaatcggcgcattaaatatgccgattgaatcaggcgttccatcagaggtcgttgatattgtgattgctattattattctatttgtggcttcaagctatgcgattcgtttcgtcatgggcaaattgaagaaaaagggggcgaactaagtggacattgtgcagattttatctatcattgtccctgccacactcgtctatgcggccccgcttattttaactgctctcggcggcgtgttttccgagagatcaggtgtggtgaatatcggcttagaaggcctcatgattatcggggcgttcaccagcgtgttatttaatttattttttggtccggaattaggtgccgccgcaccttggctttcgctccttgccgccatggcagcaggcgccctgttttcactgattcacgcggcagcggcgatttcgtttcgcgccgaccagacagtcagcggtgtcgccattaacatgctggcgcttggggcaactttatttatcgtcaaactgatctacggcaaagcgcagacagacaaaattccagagcctttttataagacgaaaatccccggtttgggcgatattcccgtcttgggaaaaatcttcttttcggatgtctattatacgtctattcttgcaatagcacttgcctttatttcctggtttatcttattcaaaacgccgttcggccttcgtatccgttctgtcggcgagcatccgatggcggccgatacgatgggaatcaacgtatataaaatgcgctacatcggcgtgatgatcagcggattgttcggcggtctcggcggcggcgtatatgcctccacaattgcgcttgatttcacgcactctaccatctccgggcaaggttttatcgccctggcagcgcttgtattcggaaaatggcatccaatcggagcactgggggccgccctgtttttcggattcgcccaaagcttaagcatcattggatcactgctccctctttttaaagacataccaaatgtgtatatgctgatggctccttatgtcttaacgattctcgctttaaccggctttatcgggcgggcagatgcgccaaaagccaatggcgtgccttatattaaaggaaaaagataaaacattctcccctgggaagacgattctcaggggtttttttctaatccaaaagacccccttaatttaattgtttattagttttttaacttaaaaaaatatgaagtgttaacgctttcttgtagactgtaacaaacaatacatgggggtgtatgacatgggagcaattccaaaaacggggacaatttcacctgagcaaaaagactcacaggggaaaaacctgtttcaaaaaatctggtcttgggaaatcggtgtgattcctctgcctttatacacagtattagctgttattattattcttgcagcctattacaatgagctgccggcaaatatgcttggcgggtttgccatcattatgattcttggtgtgtttctcggagacataggccaacgcataccgatattgaaggatattggcggccctgctattttatctttgtttgttccttcatttttagtcttttacaatgtactgaattcaacatctttagacgctgtaaccaacttgatgaaaacgtctaacttcctttatttctatatcgcttgccttgttgtgggaagtatcctcggtatgaacagaattgttttaatacaggggtttatcagaatgttcgttccactggttgcaggaacgatcgcggccgttgcagccggcatccttgtcggatttatttttggctatagtgcctatgattcctttttctttgttgttgtcccgattattgccgggggaataggcgaaggaattttgccgctttcaatcgcctactcacaaatactgggctcatctgctgatgtatttgtgtctcagctggttccagccgcaattataggaaacgtttttgctatcatatgtgcagccttaatgaaaaagcttggcgataagcgtccagatctaaatgggaacggacgtctcgtaaaatctaaaaaagcaaatgagattttcaatcaaaaagaagccgaagcaaaaattgattttaaactaatgggagcgggagttctgctcgcgtgtacattctttatttttggcgggttattggagaaattcatcttcatcccgggcgcgatcttaatgattatttcagctgcggctgtcaagtatgcaaatattcttccgaaaaaaatggaagaaggcgcttaccagctttataagtttatttcttcaagctttacatggccgctgatggtcggtctcggcatcctctttattccgttggatgacgtagcgtctgtgatttctataccgtttgtcatcatctgtatttcagttgttatcgcgatgattggttctggatatttcgtaggcaagctgatgaacatgtatccggttgaatccgcaatcgttacctgctgccacagcggtctcggcggaacgggtgatgttgccattttatcggcatcaggaagaatgggccttatgccgtttgcccaaatttcaacccgtctcggcggtgcaggcacagttatttgcgcgacagtgctgcttcgttttttcacttcataaacagaaagagttccgttttatgcggaactctttttttatttattcacaatccgaatatactctcggggaccaaacggcagatcctttgattccatctcactcattctggctgacaggtggtgctccagtaaatacagctcccactcatcactagccgccacaccgctgcgcccgtcatattgattcaacatgaatgcccctgcaaatactgagcagaataaacctgagcacatcacgacttttcttttcacatgaccagctcctttccttcagcttgatcaggattgattttaaatatacaaataacctcttttttgttagacttattttgaggtcaaaagaactcataaaaacccattacagcagttcgaagcgtggcagcttgcagaaaagtgcgatataatttggactaggtcgtttgaccgtatatttcatacatagcgcatttttcaattgagaacgagaaaaggaggtcttatctttgcagctcttacatcttgctattttatcgccttttttatttgcttttatcattcccttcttggcaaaatacgcaaaaagagtgcatacgggctggtttgtgttgatcctgcccgtcttgctgtttatatactttctcccaatgatcaggatgacacaatctggagaaacacttcgatcggtattagagtggattccgtcactcggcattaactttaccgtttatatagacggcctcgggttattattcgctttactgatcacaggcattggctctttggtcactctttacagcattttttatttatcgaaagaaaaagaacagcttgggcccttttatgtctacttattgatgttcatgggcgccatgctcggtgtcgttctagtagacaatgtcatggttctctacatgttctgggagcttacaagcctttcatcctttttgctgatcggctattggtataagcgagaaaagtcgcgctatggcgcagccaaatcacttttgattacggtcagcggcgggctgtgcatgctcggcggatttattctcctttatttgataacggattccttcagtattagagagatggttcaccaggttcaattaattgccggccacgaattgtttatcccggctatgattctcattttattaggggcttttacgaaatcagcgcaatttcctttttacatctggctccctgacgcgatggaagctccgacgcctgtcagcgcttatctccattcagctactatggtaaaagccggcatttatgtgattgcgagattcagccctattttcgccttttcagctcagtggttttggatcgtgtccctcgttggcctctttacgatggtttggggttcattccatgccgtgaaacaaactgatttaaaatcgattttggcgttttcaaccgtcagccagctcggcatgatcatctccatgctcggagtcagtgctgcggcccttcattacggacatacagaatattatacagttgccgctatggctgccattttccatttgatcaaccacgcaacctttaaaggaagcttgtttatggcagtcgggattatcgatcacgaaacaggcacacgggatatccggaagctaggcggcctgatggcgattatgccgattacatttaccatttccttaatcgggacattttcaatggccggcttaccgccgtttaacggatttttgagtaaagaaatgtttttcacaagcatgcttcgcgtgacacattttgacctgttcaccgtgcagacatggggcgttctgttccctcttttcgcctggatcggaagtgtatttacgtttatctacagcatgaaattgctgtttaaaacattcagaggaaattaccagcctgagcagcttgaaaaaccggctcacgaggcgcctgtcggcatgctcgtaccaccggtcattcttgtcgctttggctgtcagtctcttctttttcccgaatatattgtcgtacagcctgatagagcctgcgatgaactcaatctatccgacactgcttgccggccatgagaaattccacgttcacatttcacagtggcatggggttacaacggaattgctcatgactgcgggtattgttgtgatcggaacaattggttatttgtcgctgaataagtggaaaggaatctataaactgtttccttcgaaactcacactcaatcggttatacgataagcttttgactctgatggagaaaggctcttaccgggtcacaaaacaatatatgaccgggtttttaagagattatttgctgtatatcttcgctggtttcatcattctgataggcggagcttttgccattaaaggcggattttcatttaaaacggaaggcatggctaaaatcggtgtatacgaaatcattttgacgcttgtcatgatcagcgccacagtggcgactgtttttgctaggtcaagactgacggcgatcattgcactcggtgttgtcggttatacgcttgcattgttttttgtcattttcagagcgccggatttggcattgacccagctcgtcattgaaacgatttctgtggcactgtttctgctttgcttctaccatttgccgaaactgaggctgaaaacaaaaacgagaacgttccggatgacgaattttatcatttctttaggcgtcggtattattgttactctgcttggtatcgcatcctcaagccagcggacaaaagacagcattgcgtccttctttgtcaaacacagccacgatctcggcggaggggataatgtcgtcaatgtcattcttgttgatttcaggggatttgatacaatgtttgaaatcacggtattaacgatagccgctctcggcatttacagcatgattaaaacaaaagtaaaagaggaggggaaaagcggtgaatgaacaaaaaacaaatgacttgattcttcaaaccgcgacaaaacttgtatcctttatcattttgcttttctctttctatttatttttatcagggcataacgcgcccggaggaggctttgtcggcggactgatcacgtcctcttccatcgttctcttgctcttggcgtatgatttaaaaaccgtgcgttcccttttgccggtcaatttcatttatgtcgcgggagccggccttctgctcgctgtattaacaggcgttggctcctttgtcttcggagctccttttttaacccacacattcggatactttcagctgccgatccttgggaaaacggagctcgccacagcgacgatatttgatttaggcgtttatcttgttgtcgtaggcataacgatgaccattattcaaacgattggagaggaagaataatggaaatcttaatggctgtattagccggtattatttttatggctgctacgtatttgctgctgtctaaaagcctgcttcgcgtcattatcggaacagcactgttaagccatggcgttcatttaatgcttttgactatgggaggattaaagaaaggcgccgctccgattttgagcgagcatgccaaatcatttgtcgatccgcttccgcaagccctgattttgaccgcaattgtcatttcttttggcgttacatcattcatcctcgttatggcctttcgcgcttatcaggaattgaaatcggacgatatggatcaaatgaggggaaatgatcaacatgaataattttgttattttgccaatcctgatcccgcttttgtcggctattcttctgattttcatgacgaagaatcttatgctcatgagaatcttcagcacggcggcatcggccatcgggattgtgattagcggcatacttgtacagactgtcttcacaaaaggcatccagacactcagcttaggcggctggaaagcgccgtacggcattgtgcttgccgcagaccaattcgccagccttctcgttctcacaacagcgatcatcggtttattggttgggctttattccttccgttctgtcggtgaaaaacgggagcgctccttttactactccggcgttcagttcttgcttgccggcgtcagcggagcgtttttaacaggcgatttatttaatatgtacgtattttttgagcttctgcttattgcttcctatatgctgattgtattaggcggtacaaaaattcagctgcgggaatcccttaaatatattgtgtttaatatcgtatcgtctgccctgtttgtcataggggtcggctttttatacgctgtaaccggtacgttaaacatggcagatcttagcatgaaaatcagcgaaacaggacaaaccgggctgatcactgtgattggtgtcctgatgcttttggtatttggcatgaagggcggaatcttccccctctacttttggcttccaggctcttattacgcgccaccggcagcaatctccgcgttgttcggcgctttgctgacaaaagtcgggttatatgcgattgcgagggttttcacattgatttttattcacgatacagcctttacccatcagctgatgatttggctggcggcgctgactgtgatttttggtatcatcggttcactcgcttattcgaatgtcatgaaaattgtgatctataacattattaccgctgtcggcgtgattttgttcggtgtggcagtacacaccccagcatccattcagggcgcgatctactatctgattcacgatatgctgattaaaggcgctttgtttatgctggcgggtacgctgatcgcattgactggaactgcgagcctgcataaaatgggcgggctgatcaaacgctatcctgttcttggatggatgtttttcatttccgctatttctcttgcaggcattccgccactgagcggatttgtcggcaaatttaaaattgcggagggcggcttcgcagaaggtgaatttacgatatccatgctgattctgctttcgagtctgcttgtactgtactctgtgctgaggatctttatacatgcgttttggggcgaagaaaaagaaacgccaaaaccaaatcatcgaacagctaaaggacttctttatccggcagctatttttctcttgctgtctcttctcttcgggttgggtacagaatgggtgtcgccttacgttgatcaagcggccgagacgctgctgaatccggaaaaatatatcgaagctgttctgaaggagtagatcgcatggcttttcaaattttattaaatgtgtttctcgctttttgctggatgttcttaagcaacagtccaagcgccgcaggattcattacaggctatattctgggaatgctctctctctttttcttccggcgctttttcactcgccagttttatctatggaaattgatttctatcatcaagctctgtttcatttttataaaggaactgtaccttgccaatgtcagtgtgatgaaatcagtcttatctccaaaactgaatatcagaccgggtatttttgcttttaaaactgaactgacgaaggactgggaaatcaccctgctttctctgctcattacattaacgccgggaaccttggtgatggatatttcagatgacagaacaatactttatattcatgcaatggatatcgaggatgcggaaaaagcgatttttgacattcgggagtcatttgaaaaagccatacaggaggtgagccggtgatgtttacgctgatcctgcaaatcgcgctcggcattatggcagtgtctacctttttgtatgtcattcgtgtcattaaagggccgactgtgcctgaccgggtcgtggctctggatgcaatcggcatcaatctgatcgcaatcacggcgcttgtctccattttgctgaaaacaagtgcgtttttagatattattttgctgctggggattttatcgtttatcggaacgatcgcattttccaagttcctggagaaaggagagattatcgaaaatgatcgaaaccgctaaggtcgttgtggctgtattcattttgctgggtgctcttatatgcctcattgcttcatttggcgtacttcgccttcccgatgtgtttacacgcgctcatgctgcttctaaaggctcaacattgggtgtcaatatgattctgctcggtgtcttcttctatttgtggtttgtgacgggggagctctccgctaaaatcctgcttgggattctctttatctttattacgtcgcctatcggcgggcacttgatctgccgtgctgcgtataactccggcgtcaagcttgatgagagaagcgtacaggatgactataacggaatcagaaactttgtgattaaacgaaaagaggattcttatctataaaaataagcagccggacaggcagagttccggctgtttttttatttcttgatgacagccagcgtgcatctggatatacagatcagcctctcttgctcgtcatatatgtgaatgtgatagacaatcgtcgttctgccgatatgaacgggctcggctaccgcctttaccgttccttccttgacagattttaaatggttggcgttaatctccaaaccgacacaagcctgtgttgaatgatcaatcaggttctgtgcacctgcgctcgccgctgtttccgccagggccactgaagcgcccccatgcaaatatccgaacggctgcaccgtccgatgatccaccggcatgaccgcaacgcaacgttccgctgtgttttcaacaatctctataccaagcgcttcaagcaatgtgtgcttcgtatccatcatctacacccccaatatttaaagtacaccgtctgatttcgcaatcaaaaccgcttccgtccgggaaccgacattcagcttattaaaaatcgatgtcaagctgtattcaatggaccgcttgcttaaatgaagggcatctgcgatttcttggtttgtaaatcctttttcaacttcttgaagaatcaggcattctctaggtgtgagcacatcttgttctttttgagaggaaggagccggctttgttttttgctgagtcatcagctgtttaaagtaagcaaaatcgactaaaatttctccattgagtacgtggtatatgtattgggtgatcttttctttagattccgttttgctgatggcaccgtgcagacccgcacgaatcgcttcctcgaaataatcctcgacctcataaccggtatacacgataattttacaatgaggattctcttgtaaaatctgtttagaaagctccatcccattgacctcgccgcctagattcagatccattaaaatgagatcatatgacgagaaatcatgctgcttgataaactgttcgctcggttcaggactgagacaatcaacagacaaattcgaatccgtttccaaaattgtcttggtgccttccatgacagccggatggtcatcaatcactagtatctttttcatgttttcctcccttttactcactcttttccattttataaaaaagacttggcctgtgccaagtcgtttccgttataaatccattacaattcgatttcaatatcagccttaaagccctttccttcacttgtttcaatccgaaggcgcccatctaaagccctgactctctccttaatgccagaaagccccatgctcatggaatgctcagtatttttttcttgatcaaaccctacgccatcatcctcataatgaagaacgattttgttttgaatactgatgagcataatcagcacatccgtcgcctgagagtgcttgaccgcattagacagaaactcttgaatgatccggtacaaattcagctgcgaatccagatcaagggaagccgtaaatctcccggtatttaaacggatatgaaacggaacccgctcctgctgctgcgccaccagcttcgacagcgccttcaccaatccaagatcatacagaagctgcggccgcagctcatgacacgtctccctcgtcatcgaaatcacatcagacatctgctcattcatctgcacaagcttgtcctgcacctcttcacggcacggattatcatccttcttaaaatcacccaaaaacagctcacactggcgttttaaggaaattaaatcctgaagaaccgaatcgtggagatcgcgggcgagatccgagcgttgtttttcctcgatcgtgtacatgagttttttgagccatacggggttggattcttgttgttttatttcttctaaatgactcatcagttcttcgattttcatgacgttttcgatcgatacgtttgtataaaaagccaaagttttcagccaagaaagttcttcgagtgtgagacgaggcgtattcattttagataaacaaaggatcacaaatgatttaccaccgcgttcacctattttcatgacaaagcctttattaaattcaacgattttccctatttcggatgttacttttctaaattctttttgatagactttttcaaatgaatttacgttctcatcatcatatagtttaatatttccgtcagctgaaacttcatatacatgtgctcggctaacaagagaaacctcaagtatagtatttttcagttcttcaaatacttgagatagggaagtagagtctcttatcatctgcgtgaatttatatatactgtcttgataattgaatttttctgagaccctttttaatctaaatctgaaatcaagtacttctttataataaaagaccgccaacatgataatataaattaaaaaggttagtttaacactataaaaatcactatcaggactactaattaattcaattgtagagattagaataattgttggcgttagagctaaaaagccatagtaccttaatctgcttaaaataaaatctacattatagattttatttgtcatgaattgaaataccaatgagaatggtatcagcagcataaatgaagccgctaaaaaagaagaaacataatgtgcatttaaaaacacgtaaggtatcaaatataaacacagaaaaggcgaaaaagaaaagatattaatgatagtgagaaccttaataatatgtgcttgttcagtgtctttatttttaattagtatgatactaaaataaacccctactataataaataaaaagaaaaaagcaagtaaatttaatttaggaacataatctcgaaagaaaagatgtgaacgaaaaatttcacaaactacatttatgaccggaatcaaatataaaataaaaactttcttattaaataatttggttcctaattctttgaaatattgataaagaaagagaagatagtttagcggaacagatattaatgttaccaccattataagcctgctcagcatatctcccttagcagaccctccagcacttataaatgcaatagaggcagacaacagaaagataattaaaactacagctgagagaaggttctttgattcatttatttttaatataaaaaagcaacaaaataaacaaacaatataaaatattaacggtattaagtaagtagtgaaatttttatcattaaataaggtcattttcaactcaagattatgtccatttctttccacaatcatcgaacttacattttttagtttgttcatttttatttcgtttgtgtttatctttttattattaatactctttacgatatctcctttttctataccgctgtatgaagccattgaaaattcatctacattggtaattacaatatcgccattttttcctttagagacagttgcccctactaataaattattattactaatataagtcaaataaataacataaatcaaacttaatacaactaacactacagaaattttgttatttctagacttcatttaaacctcagtacttccaatctagcattgaataaatttctaatcctttaaaaccatttattatgcattcagattgatcattatcaacacccaataaacaagcatttccttccattacttcccttaaaacatttgggtatttaattaagtatcctaccatttcttgcataataaatcccctccttatttaatcataacagacaataatttttcagttttatcttctcctagttttaattgtgacatttcattttttattttttggagagataaatgtttcatcaccagtaaatattgtataacgcctgcttctgtcaattttcgcttcaaagccttagtattaattgaaacaaattcctctggtttttgatataaacttagtagctccgctgaagcatcgttaaattgtttctttaagtataagtatgccaatgtattttttttctgaacaaaatcgttatttaagtaaaacaaacctttataatcattatcgatctgtgaaataatcccaagttcataagaataagaagccacgatgggatgatatttgcctgttgccaacattactcccattacacaaggcaatgccgttagcgctcctgatttatttttgatcatttcaagacaggcttcttcagtttgcggcgcattcacaatatcatcatgctggccttgaattgattgtaacgcaaaattcaatatctcttgtgaaaattctggttcatgactagcttgacacatcacttgtatacttagggtgtaaagagctgtaactgcatttaaagcgattgacgagtcaatcttcatccagacagcacttccattatcttgatcctctaagtcatcataaatatcgaatgagagtataagcaattcaattccggcagctagccattcgattgctttttggtcctgaccgttaaaagctaaataatgatgaagagccaaatcggcaaactcaaacgtatccttagactcaataaaattctgaagatatcgttccaagtcctgattcattattttttggcttacaatctccttcattttctccttgatccggacagaatctaaacatatctgctcaataacgacttcccccctcccattccattttactaaatgggacatttaaaggacagcaggtttttcgttttttaacaatcatataatactttatccatttattgtatcggtagaacgaaaaaaaagacttgtttccaagtctttttcacgaaattttcattgcataattgtatttatcgagttgatcaatgcttttgttaatgtttcgtaatgaatctgtcgtttctttaatatcaagttcgagtcggaataacaattgttttacttcttcaagtttcttttccatcgtttccacactcctttttttgaaagatcaatgaattgtgtatggtgaacgagtcctaggtatttgatctgttactaatagtgtatctgctttcggctcatttttcaccgaaaagtatgcaaaaaagtcctgcgtgacaccgcaaatctcaataggtccttatactcaaaggaatcacaacaagaacgggactatctttctatgcgaaagagcgtttatatgtgctgaaattgagaaagattcttaatctccttgattttaacgggtttcgcattttcattaagcaagactatagtccttcataccgtattttcaaaattgaatatgcgattcttggcgtttcctgaccgacaaacaccgaaaaagaccgcaacgctaaagttgtggccttttcgctttgtcatattcggcaattagggatctatacatatagaaacatccttttttgcgaggtgctcccatgagatatcgttatccctggttttacgtgtatccgtatgaggtacgccgtccgcccgctcctgccaacaatattgatacctttatccgttcagcgaggcaggccgcagggatatttgcggatgcccagctcgttctcggccgcattgcgggctcgcgggagctctcgcgccgcattctgacggcagccgagcagtccgataaacaaaccatcaagcgcctgatcaaacaattgggcgtccggcatgaagtggatacggtctttaatcccgacggcatctatatcagtcttatcggaacgcaaagccgaatgattcttgctttgcggtggtcagaggaccgcaatcattttgcgtccataagattatgacaccattccagagcctcaagataacattcatacgcttcttctttgtcgagttgattgcctaattccgagcaagtgtcccagttgttgctttcaattaatttcacaagctcaagcatttggtagtagtcgttttgatggcctaataatgcttgcccgacttcatcttttaaaggcaattcttgaacaatttcctctatttctctatgcaggagggtgtctatgagagaaaacattccgatcagcatataagaagcaggctgcggccgggatgtctttctcgccagcagttcgcaaagctttgctcttatcaaagaaatcttaatgatttcgtgcttgctggaatgccctttcctgcttaaatccttaaaggaaagaatatagatccaccgtttgatttcattaaatcccagcagcataatggcctgttgaatgctttcaattttctggctcaaacggctgtgggatgagtttaaaaattttaaaatttgataggacagtgataaatcccgctctatgtactctgtcacacgctttatgttaggctgctctttactcagttcgttaagcagttcatagtaagaatagaaatgagtcgataggtcatgcccgctgatgatgcgcggctcgctgaaaaagtagccttggaataattgaaagccgtcttggaccgcctgtttatattcttttcgggtctctactttttccgctaaaaaaatcaggccgcggcagccgtaggtttgcaaaattgttctgcgttccattcgtgttgttttgagaaaatcaattttcaatatatcaatatagctcatgagtttttccagtaagtcctcatcttgcgggtttattgcataaaaatcatcaagcgccagcatataccccatttttttcaattctttgcatctagaaatgagggccggcgtgatcggtatatcttcaaggatttcaatgacaagctgtttcggattgaaggaggtaggaagattcgaaaacatcaggctttccgtaaaattaacaaaacagcgtttcccttccgtcagcttctcaattccgatgtttaaaaagctgttgatcaccaaatctgttgttgcctgatcgccgtctttagcgctatacacgttctcttcgctttctctatacagcagttcataagcaacaacctgttcttttctattaaaaataggctgtcttgcaacaaacaccctcattgatttatcccccttacaatacgcgcggctttcacccctaagtatatcaaataatttgacgaaaattgtctaaacatgaaaaataatatatacataaagaaaactggcccttcgtgaacgaaaggccagtttttctttattcttcctcaagctcttcttcaattctgcttttcacttcgtggatccgctgcattttattgctccagcagtcctcgcttaaatcaaccgggtattcctccggcttgctgattctcttatattcctcccaaagcaggctgaggttatcctgcacatactgctgtatgtctgaaatctcagggttttggtagcaaagaatacccttctcaaaaatcagctcatgaagatccttcgcataaaaattcgtgacaaatttgctgatgaatgtatgaaccgggtggaacattctgagccgcttctgatcattcacctgctcatcataaagcgcaatatagtcgccttcagaatgatggttggactgattaataatgcggtagactttctttctgcccggtgtcgtcactttttcaggattggacgaaattttgatcgtgtcaaccattttcccgtcttcttcaatggcaacgagtttataaactgcgccgagagccggctggtcataggcagtgatcagcttcgtaccgacaccccagacatcaatgcgcgctccctgagcctttaaattcataatggtgtgctcatccaaatcgcttgaagcaatcaccttcgcatctgtaaatcctgcttcatcaagcattttccgggctttttttgacaggtacgccaaatcgccgctgtccagacggatgccaatgaaattaatgcggtcgccgaattccttggcaaccctaatcgcgttcggcatgcctgaacgaagcgtgtcatacgtgtcaactaagaaaacgcaatccttatgtgtttccgcgtattttttgaaagctgtatattcatcgcggtaagcctgcacaagcgcatgcgcatgtgtgccggaaaccgggatattaaagcgctttccggctcttacattgcttgtcgcgctaaagccgccgattaaggctgctctcgctccccacatggccgcatccatttcgtgcgcccgtcttgttccgaattcaagtgcaacttcatcaccaatgacgcctttaatccgggcagcctttgttgcgattaatgtttgatagttcacaatgttgagcaaagctgtttcaatcagctgcgcttctaccaggggtgcctccaccctcataatcggctcattgttaaaaacgagctctccttctttcatggagtaaagtgaacctgtaaaagataagccgcgcaaatattcaataaaatcttcatgatacccgagttcatcctgtaaataactcaaatcgctatccgtaaacttgaaattttccaagtattcaatggctttttccaagcccgcaaatacggcatagccattttcaaacggaagccttctgaaaaacagctcaaaaatcgctttcttttcatgaatgccgtctctccagtacgtttccgccatattgatctgataaaggtctgtatgtaatgacaggctgtcatctttaaatccgtactctaacactgtttttccccttccttactctgccacttgcgctccgatgctgtttgcaaaatgggaaagagcccatgcgtgcccctcctgattaaagctggcaacagcttgtttatgcacaacaatcccaaaacctttgttgtatgcgtcaacagctgtatgcaacacacaaatatctgtgcagacaccggcaaggtgcagttcgccaatctgccgctctctgagtttgagctctaaatcagttcccgcaaaagcagaatatctcgttttttccatgtagtaaacattaggctcatgttcatgtttctgatatagaggcaaaagctttccgtacagatcttttccttccgtgccttttatattatgcggaggaaaaagacgggtttcagggtgatattgatccccttcatcatgagaatctactgctaatacgacgtaatcaccgtttgtgatgaattcttcagttaaattgacgatcgcctcttcaatcattctgccgggctccccgcaggtcaattttccgtcactcgccacaaaatcattcgtataatcaatacaaataagtgcttttttcatagccggcctccccgccatcagtatgagaacattatatcttatctccagttgtaagtgaattgccatgaacaaaaagacaaacggtccgtttgtctcttaagatttcagcactgaccgattataaatgtcgtcctgaatatatatcaattcacgattcacagcgatgtcagccgcaatgacgatgcctaaaggcgtatgaaactgaagatcagatacaatcttgaagggcactccgtaccggttcgccatttggatataaggagagtaagactgatactgaagctctccattaatcaaaagggtgacgttatggctgtttttcagctcgtgctccgcctctttatacggtttgcttctaagcacctgtccttttgtcagtgccaaaacgactctttctcttagagaacctaaaaacaagtggcgctcgtcaggctttgtctccaaaggcccatacattccttgctgcaaatagagatccattttatcttcactcaaaagcctgtcctcccgtcttgtttgtcttcattatcacctgatcaggcaggagctaaactttcaagcgccgtttacatttctgttacccaatgaatgatttttttggccagctcaccagcagggatttcctctgtatgccggcgcaacgacgcttccagccgttcaggcagagttgctttatcttcttcataggaaatgatcgtgctccactccagctgcggtaccgctacaagcgtgcgcagttcttttctgttttcatgcagatacacgtccgtgatcattccggtttgcgtattgatatttgcttttctgattttcataacatgacctctctattcaaagactacccatattatacaataaaaaagcaacagcctcttgtgaaaaggctgttacccgttaaacgaaactgtttcatcagtgatatcggcatctttgaagagagttttactcgtttggttgttaatcttcacaaaatcaccaagctgaaatgtgcctgaccccgcccctgaatgagcgacgcttttgggcgaaatcgcaaatacgtctccaaagcttgccgcggcattatccgtaactgacatgatataaatcggccccacaattgcaggcatttccccacctccgcattgatttacagcatcatatgcaaagagccgataatggtgccctcctattcagctggctttgctttttcttcgagtcgtgaccgctggcgcagcttgatcaaacggacaatattcaggaagaacgccttcactaccgcataaaccggcaccgctaaaatcatgccgagaattccgccgaagcttcccgctccgattaatagcaaaataatcgtaagcggatgggtattcagccgctttccgatcacaagaggagacagcaggtttccgtccagctgctgaacgatgacgaccacaataatcgcaaacagcgctttggccggcgagtccataaaaccgacaatgacagccggcgcggcaccgagaaaaggcccgacatagggaatgatattggtaatcgccatgacaatcccaagaatcagggcatacggcagtccggcaattaaatagccgataaaacacgctgttccgacaaaaagacagattaacagctgcccctggaaatatgccgcaagcgtatcggataaatctttaaaaatctttaagccttctgtccgataagaagccggtagaatttttactgccaaatgcggaaagcggtgtccgtctttcagcatgtaaaaaaggataaatggaacagtaataataacaagcgtgatgtttgtcacgacaccaaacaccgcagataaactggacgtgatattttgcggcaggttttggagaaaacttgtcaatgactgttcaatttttgatatcgatacataatcctggttcatcatccaggtaaaccattgagaatgggacaaatcctttgtcagcgcctgaatctgttttatataatcaggaaggttgttaaacagccctgtcacctgtgaggtgatgataggtccgactgacgctgaaataaaggcaagcaaaccgataaacagtaaatagatcaataggatggataatgtccgcggaatttttttctcaagcaggcggacgaccggattaaatatgaaatacaaaattcccgcaattagcatcgggaaaaacaatgtcgagataaaaacaataaacggctgaaatacaaatgaaacttttgttgctacataaataatcagcaaaacaaataaaatctgcaatgtccaaaaatggacttttgatttcaacaagctttgttcctcctagtttttctttgtctgtcagataaaagaacttataccccatcattgtaacaaaaatgaacccatatcagaactcttaatataatgaaaggagtgttggtgatgaaggccgtgacatacgatacagattcagaactggcttatatctatgttcttcctccgaaaaggaacaggaatatacggtctgaggagcttaaagtcaatgattgtatcctgctggatatcgaccaagacggcaaaattgccggattcgaatgttttggtgaggcagcacacctctgtgccccatttgccgggaaatcccggctatatgtaaaagattcagacggttatcattttcgggtctgccagcatgcttcagtccgttcctgctatacagtgtacggcgtcactttctgtttttcagatggtgactatcaggaatttgccggttttgaccttgacggaacaatgtatcatagtgcgtttttacagcgcttaactgaaaaataggacgtcccggtgtacgcctatttttcatgcgcaagcactgttagacccgctcactgtaatctggggtgacggaaatcatgtgctggattctgatcaaacaaacagaatttcgggctccttcaattgtgatatggtcaggtttaacatcgatcagtctgcctctgaccgtatctcgtactgtctgtataacgaaccttgagccgatgagctttttaatggtctgatagacataaggatcgactaaagagaccagttgcggactaccttggttgaccatatttttatcccctttgtgtgttttatctcagcttatgccgcgcttatggataatgacacaggcttacctgataaaacaaaggggtgcggagattttaggagaatacgtttggaagcggtgtaaaggaagtatcgatgaagcggagacagcgaagaaagctggcgctgttccgtacttatacaggctttatcacggatgcctgggcttggtcgattaattggtccagcttttctattttttttcgtgcggttgaaggatcaatttggcggtaatgatgatggccgcccggctcttcatccagttcgtccgcttttttgacaatctgctgcagtgtgtttttatctaattcgccttcaggcaaataggaatctgtatgaagcaaaatggctagtgcaatctcttttgctgctttcggttcctcgccaagccgaatcagaagtttatgcgcccgttccgcccctttaatggcatgaatgtcatttcttttgtatttctcataatcccactttccgtctgtataccattcataatggccaatgtcatgaagcagtgccgcttttgctgctaaatcaggattaatgtcagccttcacagacagcctgtatgcatgataagcgcaggcaatcgcatgtgccacgccggaacgctgaagatatttttgtgcaattggatgggtgaaaacatccattaatgtaacctttctcatggaaacccctcctttagatatttttagaatcctaacataatttgcagagaaactcaattcttatgtcacatcattttgatcttcttatcatcattgttataccctaaaagcaacgtttcagtcagtatatgcggctgttcaataaaatgcgctggctgtagccttttgtataaaaaaaagagcagaaaatatctgctctacaaaaactctttaatatcataaatgcggccgttttccgtccctttttctagtaaagaaagcagcgtgccggcaataaagtccggactgcgaaggcttcctgtttcatttaatttccggaatcgttcaatgtggtggaaatcctttttcgatgaagaacggatgacggcctgcatctcagtgtccatcactccaggtgagaacgaaatcatgttcactggcagctcttcatcctcctgttcaaatccgaatgtcctcgtaaacatgtcgagcccggcttttgaactgcaatacgcgctccatcccttatatggatttttggcggctcctgaagtaatgttgacaatcgtctttttgccgctgtatgaagcaaaccgttttgtaaacagctgactcaaaagcacgggcgcagtcaggttcagctgataatggcgctgaagctcgtcaagagacgcttcgccggcacgtttgatcggcgttaccattccggcgttattaataagggtaataccagaataacgatctgaatcgatggatgagagcaatgtttcaaattgctgttcagcttcttcgagattgatgaggtctatttgatgctgcgttagtttttcatgagagacatccgttttcgttctggataaggcatggacttcatgccccttttctaaagcctgtaatgcaatggcttgacccagcccttttgacgctccggtgatgatataaagttccattggaaacctccttttccgttattattgtacggcaccgcttttacacaacacaagcacgcggcctacgctttcttgttttcctgcgctgtgacttttgggatgaggaacacgatgcctgcaattccgagcaggatcagtacgacatagatcatcggcagcagcaatgatgatgtttcttgttcatcttctgtttccgttgatgatgtctttgttattggtttatctgcaaatgtaattccaagctgtttcgactgggccgcaatcgtgttggaatcctcggcatttgttgatgtaaacaaatcttttatcagctcggcgtccttgtccttcggtttatcaaaagtgatatccttttgttcctcaggcagttctgttttttcttcatagtaggtatcttcatgcaaataattcgtatcgatttcgatgtcttttttctcatactggtttggcgcgacatctgtattttcttcagtttgggcagcagctgcagagggtatgaaaagggaaaaagagagcatacaaatcatgatccccttttccatgctgcgattacgcttcatacgtttcatcgctttctgctgtgtgttcagccatcagccggataatcagcggcagagccgcggcaatcaccgtaatgatcagcagaactgttattcccattgtaaacaagtgcccagtaccgtactggatgtcgatatatactttcgaaaccggatcttcaaatgtaaagttcggcatgatcaaatcaataagcggtgcgacatagaataggatcattgctgctgaagcaacccagccagggattgatccgaatctgaatgccgtccggatgaaggcagagcttgcgaccagcaatagaatcgtaaacaccgaccacttaatcgtctgatcgtccggcagtgaataaatattcaagccgaacaagctgatcataagtccgacaaggatattcagaattccgaataacgctcctttgacgagaagcggtgcgttttggtaatacgagctgaaatagccgattaacagactgctgatcaacacaatgacaaggatgacaaccggaggtaccgtctgaattttttcttccggaacctctccgctgattttaagcggattcgctaagtaatcatatacatagccattgttttgcccgtctactaatgtatttccgagtatgccgtatacgtcatttcgcacgagtttcgtggaggcgacatttttcccccagttgttgtttaaggtgtcggctttcgcttgaacatcattgacgctttgctgcatgttggttgtgtaatcaatgatgccggactggcgatcagacaatgaacccatcatgtctgacatttgcagcacttcctggccgaccgtatcttggacactcagtgccatggtgccagacagcccatcgttgctgaacgtcgcagattcctgtgttgcgcccgttacaagctgttctgacgcttttgcggcactttcagagattttcgtcagttcgtcgagaacacctgcttgagagtcacggatatagccgctgtagtcgtccgcaaatttggtcatgccgtcgatgaagctgttaatatcctcatctgtttgcatcgtgttgtttttgagagcttcccagctggctgattcttcaggtgtgagagccaggactgatttgacgttgccctgctggccgtcaatagcgccggcttttgcagcactgtcaatcgtaccggataatacagagtcataaacagacaaatatttatagtatctcattaaagcggagatgctttctgtattgatttctcctgaaaattgaagctgatctttattttcaagctcgcgaatcgcactgtaaatcccttcaaactcccgcttccgtttcgcttcgagattttcaagtttaccttcgagctttttcactttgtctttcaggtcatcaatttcatcagtgagaccattcatttgctctgttagttcctctaacttctttttcaactcttcattatgagcagtttctttttccttcagttcttcttcaatttgcttgattcgctcagacgctttgctgagctgttcttttgctttggcgatatcagaaatgtcatcgtttcctggttgctcttggtccccaggctccgtcgtatcttcgccgctaccggtatctcctgaatctccggttccgccttcatttgccagcttgataaattgaagggctgaatcagaagatgcagtctgttcggcagatgtgcccgtttcagtttttccgctgtcggacgcaccatcagaggcatcgccgttctgctcctgaccgtctgttcccttctgctggtcttgatcctgagtactgccgtccgtttgtccgtcattaccggtatcactgctgttattgtcgttccctgtgtcgccctgtgtatcatcgggctttgtactgcccccgtcatcaggtttttctggattatcagtggacggatcgtctggttcagtacccgggtcctccggtgttgggtcctctttttcaggctccttcagattgtctgaaatatcctgaatatcagcagcgatatttttcagttcttcacgctgtttttcaagatcaattttgagttcttcaggatcttcttctttagggtctttatctttatcattgttgtcagaaccatcgtctatgactgggtcgtcccctttcgcaactgtcaatgcctgacgtgccgggacaagcaattcatacacctgatttagtgcagcctgtcttgatgcggcctgatattgttcgattaaattactttggatttttgccatgccaagttcctgctgtgacacttgcccttccctaatttgctgggcgtttgccagcacattactggtttgtccgagctgtgacttcgcttggccgatcccagttgccaatccgctcatgcgttcgctgaactgattcgccttttgctgtgcctggatggcatccagacctgtccggatttgctgctgtgttgaatcctgggctgccaaaagcagctttttctgattttcttgatattccttgtatctttcaactgtatcaatgaattctttcagcgtatttttggcttcctccgctgtagaagctttttcttttgtcgtgccttgcgcttcattcattgatttcttcagctcatcgattaaatctttttgctgtttgatttcacctgctaaatcattagagcttggtttgtaaaagttgtacatgacattctggaattcagattctttattgacgattttgtcaaattctcctctgatgttgtccactttttgcgacacaaagttccagtataaggctgacatttttttgttcattgtcttttgggcatcctcaagctcacgctgaactttttctttgttgaccgcattcaggttatcttgaatgctgaattcaagcgttgctttttgtggatggtctttgtcatagctcaaaatgttttttgagaagtctgagggaatgtagacgatcgcatcgtatttttttgacgcgagaccggtctcagccgcgctacggtttacgaccgtccacgaataatcaggacgttcacccagaacagccgctacttccttgccgaactgggcggatttgtcctcttcatcagactttacctcatcactcaatacgccagtgtcttcattcaccaccgcgatttgccgggtggaattgactgcttttttcgtcgggtcgtctccgataaatcggaaaaacaacaccggcagcagcaaaatgatgatgacggcggatattaacttgatcaagctttttcgttgttctgtcatctagcactctccctttcagcagaacataaaggaatttgaactttttgctccttcccgttttccacaacatatccgaagcccggctgaatctcaggctcctgtctttggtacgggagaggaatgacattttgctcagactttttcatcagcagaatcgcgtggcggatttgcttcatctcagtcgtcaaggagtcatagccttttgagaattcgctgtggtttccgcccgggataaagctgaacccaagatgagcgtatgatttcatgaagttagcgagacgatcttgtattctcgtatcaatcgtctgctggaatctcgttatcccgtcaatcatcagcaccacttgtgagaatcgaagattttgcgcgtctccttggcggacggcttctacatacatggcttctcttgttttgaaaatgtcttctgctgtttcaatccactgctcaatatcttctttcgtttccaaatatgaaacatctgattccttcgcataatgagataagccgcggtcaatcgagtcaaacaggccgatcatttcggtttcatcatcaatcagatgttcgagcatgacttttaggacgtttgttttcccgcgctgagtctggcctaaaatcaggcagtgcttatgcttgcccaaatcaaaatagactgggctgactgtttcttcatgaagcccgatcggtacagataaaggcttgcgttccagcttgaagcggagagaaaattctctcgttgtcaggctctcaggcagcatcggaatcggtgccggctgctccaatgaagcaaatcgtccttgaagtttctgtacgtctgatttcagctcgttgaacatgccgatatcatcatcggcgtcaacaggcaggaacatttgcgcgaaataaagctcttccttttgaatgatgacgcgtcccggaatcggctcaagattgaatttcggacggccgtaaatggaatatccttctgattgatccatgagataatggacaacctttgttttcaagttatttaacaatgactggcggacagcattcacccgcgttgctgtcagcataaagtagatacccaagctttgtccgtctctggaaagctggacaaattccgattcaagctcatgcatctcatccttgactatgtcaaagttgtcaatggtgataaaaatgaatggaagctcttcttcgctcagcgcattgtacattttgatgtggctgatttctttttcccggaacaaacgtttacggcggtcaatttcttctttgatgcgaatcatgaacttttcaattttccttgactggtccatcaggaagtaatccgcggtatgcgggagcttcgctaatggcagcagcgttccgtttccgaaatcaaagatatagacatgaagctcttcaggtgtgtatacgtccgcaaaactcatcaggaacgttgcggctgcaatcgattttccgtagcccgaagagccgaagatgccgatatttccatcttccatcatcttataagcaattggcgcctgtctttgcagatcaggttcatctacatacgcaaagtggaaatggtctttttcgtttgaagggaaaagagtgcgcggaatacgttccgcaagcggcggcagccaagggcttggcagcttctcaattcccatttcatcttggatgcgttcaatttcgtcaactacagcttcgatttcggtttgaacgtcttttttcgcgatatcttcggtatcaacctcagaaagcgggatcagacccgtatctgtaacgatcgcgatttcatcctcggtaccgtagacttcctctaagtaaggcgccccgctccatgcagattggaaaagctcatacacttcattgtttccgacctgcaaatagccgcggcctgttacggtaatgtttgcggcatcgctgtttttcaaaatttctttactgtcggtggcatcctggaccttgagcgctactttaaagcgcgagttactccagatctggtcgtcgatgatgccgcctggcttctgtgtcgccaaaatcaaatgaactccgaggcttcgtccgatacgcgcggcactgacaagctccctgataaaatcaggctcctcgcttttcagctcggcaaactcatcagaaattaagaacaagtgaggcatcgccacttctgctttcccttgcttgtatagctttgtatagtcattgatgtgattgacttgatactggtcaaacaggcgctgcctttttttcagctcgcttttaatggaagcaagcgcacgcatactgaagtttttgcttccttcaatatttgtgatcgtgccgaggaggtggggaatgttgcggaacggctgcgccattcctccgcctttatagtcaattagtaagaaagccgcttcatgcggatgaaaatgcactgcaagtgacaagatgtaggtctggagaaattcacttttccctgatcccgttgtccccgcaagcaagccgtgcggaccgtgtgctttttcgtgaaggttcagatacacaatgtcatctttccctttatagccgatcggcactgacagcgacttcgacgattcacttgtcagccatctttgctgaatgccgatttcttttacttccttcgcatgaaaaagctccaggaacgataccgtttccggaatggaattcgtaatgccgacctggtggttcagcgtccgcagcgtgcgtgagaaccgttcgttgtcctcacgctgatgatgatcgagacggaacggaattcttaccgcttttttcttttgtattaaaatgtcgccttcatgctcattaatgtagcggacaagagttgtaatgttttccgacaagctttcctttgtttccgccgcgacaattgtcgagatgcccagatgctcatgctgtccttctaaatattcgagaatgacatgctcagagatcagctgctgattcgtgatgacaaatacaaaatgcggtttgaactgcagtttttctttgtcatcttcgagatcacgctctctgatcaattcgtaaagtgaagacaagagctgatctcgggtttgctcattataaataaatccttttgcataaatatggggcatttgaaattgcggaagccacttcatccactcccagtctttatactcttcttcatgaaaaataaatacaaaacgcaaatcgtgatagctgttaaagaacgacagctgtccgattagctggtgaatctcatttttcacaatttgcgatttaccgacaagccccatcggaccttctgccaaatcgaccgtcaccggcgcattgcggatatctttatagacgcgctgcatgtgctgcgatttctccatgaggtcatcgatatcacgattcgccaagtctccgccgctcatattgatttcatagcttgacggaactgttcccgtcccaagccgcagctggagataatccttgctttcaagtgatttttcccagatccggtcactgatttcacttgttaagtatttcatttgttcaaatgaaggaaagtgaaattcaagaacctgcttttgcttttcagcaagtgcctgaagctctttccgcttattgtctaagtaaagcttatatacacgctcccgtttttcctcgcgttttttccgctggtttttatcccggaaatattgcactgtcgaggtaatgagagtcatcataaacatcgccaaagaaacgagtataaatatgccgcgcggctggatgatggcaactacgcccatcacgatcagcatcacaagcggaggcaggatgacgagccacagccctctgttggtttgatcgctctcctgagagggaaaactgaaagaaacgcggtcatccggcagatcgtataccatccgcggcgttcttctgtactgcggatattttttctgcatttctgtactcggtttgaccgtttctgttaacgctgtttcaaactgggcataatgaacaatttctaaaaggtcttgttccgtcaccctcatttgcgtgaagttccagaatatctcatcccccggcttgagcggcgtattggcgttgattttctctccgttcaagaagatcgttccgctttcaggtcggaccgaccagctgccgcctgcacgaagcaaagaaaacgtgctttgttctgcaaatgcaaagtcttgcggattcagataaatatctgcattcgttttttctgaggaacatacaatttcatcccggtttcccgtaaaataaacggatttctcaggttcactgcccgtcaatatcaagcgtatatcctgctgatccgtttggagagtaaatgatatatccgcctcaatcgtgccgagacaatcatttcccaggaaaacttcgtattggccgccggattcctttcttttaagagaaatcactccgctattaaatggaatggagctgatcgtaacagaatccttcacatcaggccctatggtcaccggatgagacgacgggaggttagacagatttaatttttgaacgttattttggtaaaaaacccataatagactcaaatggcgaacccccttacggccgaatggcagcatgcgatgacctgcgcttcatgtctcacgttatttgtcatcttttttctcatctttcttttctgtttcttttttctcgtcttcttttttcttctgttcttcttttttcgctttttcctcggctgcggctttttcttctgccgctttctcttctgcttgtttttcttcgtctgtttgtgtctgttcttcgcttgtatcgactaacgatgtttcagaattagactgtttattttcttgacgttctttttgcgctttttcaagctcactatttactgagtcaagttctttttgtatgtcttcatcatttgtatcctcagataaaagctgctgtttatatttagctagggcaaagtaaatataatcattgtattcaagcttacggccgatactgatcgcttctttgtattctcctcgaccataatcaatccaatataagaaatgctgagggtctgattgaagggtgactaaattattttctatatttttggtttttgcactccccaggttttcgacctcaacataggacgtcgccagctgatactgcaccgattcaggcaggctttccgcatcgtacttggacagtgtgctgatgacttcactgtactgcttgtttaagaacgcacggttgctgtccactatcgcttggtgctttggctgcgcgaaaaataaggcgtacatcgaataaataagtgccggtacaagcaaaacaatgagccccaagccgatatatcgctggatgttccacttctttctcgggatatgtatgtatgtttttgctttggcttcgagctcatcaatatgggtttgaatcagctcgagcaaatcatcataggattcagcatctaatatcgcctttgcctctgcggagaacgtcagcgtttcattgaatttcaggtagtcttcaaacgcaaaagcgccgtcaactgccaaagccgctgccgctttcagctcctgccatactctttcctcatcacgctcgtaaggaggaatgctttcttttactccataatggagaaaataaggcgtaagccctttatcgaatacaatgttttcaggagcgacaatcaaattcagcctcgacagattgtgctgctgtacggcttgaacaagctgataggcaaactgccatttactttttttatccttagctttcatgaagcggaatgctttataggaggagggaggttggattgtgatgattacttcatcatccgtcacatcgatttctttatgaaaaaatggatttatatctttgatcacgttagcttcaagaccgtcgagaagctttattttttcccgttgaaaggtaaatgtatagccggcatctgttttctcggcaacagcttctaattggttttctaaatatgatttttgttcacctgacattcaaccagatcctttcataatatttcaagccggtctccgtttgtaatgccgcaatcagacagcttgcattctccggaaaacaccttatccttgttcaccactctgatccagtgcccttcgcgcggaggcatagatacgctttgggcctgccaagcaatatcaattacttttttcaccgggtggtaatctgacaatctgagatcaaagacactgccgttataatgtttcaaatctattgtaatatcaatatacatttaggatcacccttacatagaaagagcgccgtcttcttttgaatcaggcgctccttccctttcatactgttatccgcggatttgatttgcgatgtcttggtcagtagactcaagtgtatttgctgtttgatcaagctgctgattcacatcttgaagcaaatctgacattttgataaatgaaggtttgagctgctcgtattgatctgcgaacgcttcgcttgaagcaccttcccacatgcttttcaaatcagagatcattcggtttaaacgatcaacctgatttaatacttcttggctttcaacgccgtattgcttcgccatcgctcttagctcttcgggtgtgacacgaattaatcctgccatattcctcattacctcctgtgccatcagcctaaatatgggctaattcacttatttttagaacgtcattattataaaaacagtttttcggcatagtcaaacaaatatgttttaattttacaaaatgagtccaatggtttaccccgaatcacttaaaaatgacatatactgtaaagtaaataggtttattttcttaatcttctcttcattctccgaataatccaaaagacccaaataactccccaactcccaaaaaaaacctttcagaaaatttgatgctacagcaccatttctgaaaggttcaattttttctttccttaattagtctcgcctccgatgactttcttagaagattaataggataagctgtcgtattatatgaggcatacaactgtcctgcaaaaaggcgattacaccgccaaatgtatatagaacgtttctctcatgaaattgtttttttgcttctgttctttgttgttgattttcacaaacaacaacaatcataataaaaggaaggggatgagatgtcaaagagaaatcaagcacgaaaagtagggagatttatgaccatgccgaatgatccgtttaaatatagttttgacagacttgaagatgtggctgatcatatcagcgacgttctgcggtgcccgatcaccatagaggatgttaaccacaagctgcttgcctacagtacacacagcgactgcacagaccctgcccggacgtctaccattattggcagaagggtaccggagaaggtgattaacaagctgtggaaagacgggacaattcctgctctcttaaaaacggaccagccgatcagagtcaagcaaatcgatgaagtcgggctgagcaatcgcgtcgctatttcgatttggaaaaacaagcaagtacttggcttcatatgggcgcttgagatccaaaaaacattgtccgatgaagatctgctgacattgcaaatggcagcaaaagcagtgaaaaacaagcttctcaaacttcaaatcagaaaaacgaaaaatgaagaacgcagccaagaatttttctggaaaatgctgaccggacacatccatcaggaggatgatatggcggatgggttccataagcttggaatggccgctccttcagagttttccgttatgatcatccgcataaatggcgagctgactgaaaaaatcgaacagcagctgcaatatttacaggaaacgacccagcaggtttacgtgctgctggcgaccgtagattccaatgaacttattatattaacctcacccaaaacagatcatccttttcaagatttaaaacagtttgctttaagtacgcaaaaacagctgaaggagcggtataaaatagaagacgtttctatcgcttttggcggaatatacaactctatttcttttgtctcccgctcctatcaggaagcattgtccgtcttaaaaacgaaggaacggttcgctgaagagaccaaacattttttcagcttttctgagttaggcatttatcaatacttagatgtcttaaatgaaaaacggaaacaggcgggccattataattactcgctttccaaactggaacaatatgaccgggatcaccagtcaaatatggtagagacgctagagcgctttattgaagcagacagcaacgtgaataccgcttctaagctgttaaatatacacgttaatacgttgaattaccgactcaagcggatcagccagatcgctgaaattgatttgaaaaatgtgaatcaaaaattcaccatctatttagatatcaaacttcggcacatggatttgtgaaatttcacaaatccatgtttttttattttcttaatcaaacaaagaattttccaaaatatcaagctacactaaaaatatcacagatacaggaggagacagatatgatcataggggttcctaaagagataaaaaacaatgaaaaccgtgtcgcattaacacccgggggcgtttctcagctcatttcaaacggtcaccgggtgctggttgaaacaggcgcgggccttggaagcggatttgaaaatgaagcctatgagtcagcaggagcggaaatcattgctgatccgaaacaggtctgggacgccgaaatggtcatgaaggtaaaagaaccgctgccggaagaatatgtttatttccgcaaaggacttgtgctgtttacgtaccttcatttagcagctgagcctgagcttgcacaggccttgaaggataaaggagtaactgccatcgcatatgaaacggtcagtgaaggccgggcattgcctcttctgacaccaatgtctgaggttgcgggcagaatggcggcgcaaatcggcgctcaattcttagaaaagcctaaaggcggaaaaggcattctgcttgccggggtgccgggcgtttctcgcggaaaagtaacgattatcggaggaggcgttgtcgggacaaacgcggcgaaaatggctgtcggcctcggtgcagatgtgacgatcattgacttaaacgcagaccgcttgcgccagcttgatgacatcttcggccatcagattaaaacgttaatttctaatccggtcaatattgctgatgctgtagcggaagcggatctcctcatttgcgcggtattaattccgggtgctaaagctccgactcttgtcactgaggaaatggtaaaacaaatgaaacctggttcagtcattgttgatgtagcgatcgaccaaggcggcatcgtcgaaactgtcgaccatatcacaacacatgatcagccaacatatgaaaaacacggggttgtgcattatgctgtagcgaacatgccaggcgcagtccctcgtacgtcaacaatcgccctgactaacgttactgttccatacgcgctgcaaatcgcgaacaaaggggcagtaaaagcgctcgcagacaatgcggcactgagagcgggtttaaacaccgcaaacggacacgtgacctatgaagctgtagcaagagatctaggctatgagtatgttcctgccgagaaagctttacaggatgaatcatctgtagcgggtgcttaattcacaatgagcttgcagaaagatttctgcaggcttttttattttttaaaaggaaaaaagagaccatttcacgaattatgactatgaagttgatcataaaggaggattcatatggctgttcagcaatatggcgtgttaaaaggcatagtcttagacatgaagcgggaaacagatgatgacagtcctcatttccaagtcaaaatgctcggtgaagagaatacgtattacaggtgcgccatcaatgtgatgtccagttctgaggaatctgaagtattgtatttggctgacgatcagtttgattcgggctcaattaccatccttccgaacatgccgtatggatatacaaggatcaatgaagcaaaccgtgaagtggcactggattatgtgcggggcaatttgtttgacccgcgggaaatgaagcctttgcctcatgaaatcacaggacctgataatgatttaaatgattttattgaaacctatatgaagaaagcacaagatgagaaagcgccggtttatatattcggttcaaaattcggccctgaacaggctgcagataaaatattcggctttaccccgactaacggaatgcacaatatccatatgaatcaagggaatgcaatggatacgcgctggaaaaaagacaacggctcttggcatgacgggggtattctgattcagtttgcagatcagtgggccgctgtgtttttagcgtttttatcccaatcttggtgtaccgatgaaaacggaaacccggtcagagattgtgatcatacccaaacgtctgcgtaagatagaaaaagagactgcggcgagcagtctcttcggaagtttgttgacaaaatcctaaagcgttttaaaagctttaggattttgtcatgttttcagcgtgattgaaaacccttgaactctaggaaagatgagcattggagcggagcgaatgttctaattcgtgagcaccaacgcgcagacttggcaacgaatgcgagggtttatcgacacgctgaagagactgcggctagcagtctctttttgatcagattacacattttcaacagtctttaggctgtttggcctcatatcgctccaatgcgattggatatagtccaaacaagcttcacgccctttttgctcatgaacgactgtccagccgcttggcacatctataaaaccgggccatagggaatattggccttcttcattgatcagcaccaaatatgtgccatccgcattttcaaaaggatttgccattctatttctcctcccttatttattcaactcttccagtttgacagcgagaaccttgccgatttgagccagaggttccggctgacataaatctttatgacggcagtcgatgtcgatttgttcaatctgtctgctaatataaggcttccaagagtcaggttcaatcgggtcaaaccattcaggaatgattgttgatctgaaaaacaaaacatttccatggaaggttttcggcttataggaacctaaaatgccgacagaattgacatacgtattcttcaaatttaaaatgaccgtttcatccaggctcgcaagcgcactgccgtcacggcgaagaatctcaatcgccgcttcaaaatctagcggtttgtcccctaagctgtctggatcgtacccgcctaacgccagaagggcaataagcgcttcctcatcatccggtgcctcttttataggaaggaagtggttcggataggcgtccagcatcaccaacagggatacttcttctccttgattttgcagctgggtagccatcgcttgaacgacattcccgcccagggaccagcccagcagatggtatggaccttttggctggaccgttcggatttgtttaatgtaatcggcagccatgtcatcaagtgttttcggaagctcctcgcgctgcccgattccccgtgcctgcaagccgtagattggataatctgttcctatattggtcatcaaaccggcataacaccagctgagcccccctgccggatgaacacagaataaaggaggcttgtctccacttgttcggagcggcagcagaacgtcaagagcgctttggcttgatcccatttcaagtctttcagcgagcccggctacagtaggtgcttcgaacaagttgccgatgctgagttcaacgccgagcgcttcacgaatgcggctcatgagctgtacagcaagcaaggaatgtccgcctaaatcaaagaaacggtcatcaatgccgacacgcggcaagtgaagcacctccataaagaggtcacagagaatttcttcctgtggcgttctcggtcctcgtcctgtcactgccgctgcgaaatccggagcgggcagtgctttacgatcaagctttccattcggtgtcagcggcaattctttcatcatcacaaaggccgcaggcaccatgtaatccggcagtctctcagcagcatatttgcgcagttccgccgtatcaaatgtttcttccgaagggatgacataagctgccaaccgtttatctcccggctgatcctcacgaacgattactgccgcatcttcaagctgcggatgctgaacaagcgcggcttcaatttctcccaattcaatccggaatccccgaattttcacttgatggtctgcacggccgacatagtcgagagaaccgtcagcgcggaggcgggccacatccccagtgcggtacatccgggtgcctggaggaccgaacggatcagctatgaagcgttcagatgttaaaccaggccggcctagataacctcgtgctaaccccgctcctgatacatacagctctccggcaacacccggcggaaccggctgcaggcgttcatccagcacgtatacaccaagatcgggaatgccgcagccgatcaagctgtttgcccgtaaagctgccatgcttcggtctaattcgatatagctcacatgcaccgtcgtttctgtaataccatacatattgataagctgcggtctattttcagggtggcggttgtaccaatcctctaaacggctgagttcaagcgcttctccgccaaaaatgacatagcgcagactgagtgcctgtccgagatccggctgttcccgttccgcctgcataaactgatagaaagcagacggtgtctggttcagaacggtcacaccctctttgacaagcaggcgcagaaacgcttctggcgatctgctgacgtggtgaggcacgattacaagacgtccgccatgcagcagaggaccccagatctcccacaccgaaaaatcaaacgcataggaatggaacatggtccagatatcatctgagctgaaacggaaccagtgctcggtcgctgcaaataaacgtgttacattttggtgaggaatcatcacaccttttggaacacctgttgagccggatgtataaatgacatacgccgtattcaaaggggaaagcggctgagtcctatccttattttttggattacctgcagggtacgtgtttagtttctctgccagctcgggatcatccagcacgattttcggcacgttttcaactggcggaatgtgatttgcagctttagtgttcgtcatgataaacgcaggctgtgcatcttttagcataaaagcaattcgatcagccggataatccggatcaagagggagataagctgccccggcctttagcaccgccaataggccgacagccatttccaacgatcggggcagtgccaatgccacaaattgctccggcccgacaccttcactaattaggaatcgggcaagccgatttgctctttcattcagctctgcatagctcagtgcctgatcttcatatacaacggcaatagcatcaggacgtaaagcagcctgcttctcaaactgctctggcaaacttgcgtgcggaatcttttcagatacactttgccaatctgtcaccatgctgctgcgttcctctggcgcaagaatatccagatttccgatttgctcgtcaggatcagactcggcagcctccaacagccgcatcaaacggtcagcaagagcctgagcagtttcccgcttgaaaagatcagtgctgtattcaagcagtccttccattccgtttggtgtcccgtcagcaaggcgatcttcactgatttccagcgtcaaatcaaacttggcagaaccgacactgttgattcgcaggctactctccatatcaggaagatgcaattcagcgtccggtgtgttttggaacgcaagcatgatttggaataaaggatgcgtcgcacgcgaacgagccggattgagcacctctacaagtctctcaaacggcagatcctgattgtcataggcggccagattcacttcccgtactctgtctagaagctcacgaaagcttgggtcaccggacgtatcagttctgagcaccaatgtattaatgaacagccctacaagatcgcccagcgcatcatcattccgtccagcgatcggactgccgatcggaatgtcggtgcccgccccgagccttgtcaataaagcggcgagaccggattgaagcaccataaacaggctcaccctatttgcgcgagccagctcctgcaatcgcttatgaagctcgggctcaatacgaaaatgaatcgtatctccatcatgactcggctcagccggacgtgaataatcggttggcagctcaagctgatcaggcaggtttttcaaggtttctttccagaaagcaagctgtccggcaatcaagctatttggatcatcctcgtttccaagcagttcttgctgccaaagcgcatagtctgcatactgcacagcaagaggcgcccattctggagatcgtccgtggcagcgagccgcataagccgtcccaaggtctcgggtcagcggtgttaaggaccagccgtccccgacaatatgatggacgagaagaagcagcacgtactcgtcaggaccgatcacaaaaagctcggcacgaaaagcaggttcagctgcaagatcaaagctgtagcgtacagcttcggcaagccgatcagaaagctccttctcagcaatttcagtaacatgtaactcgggacaggcttgatcagcatctaaaatatgctgataggatgtcccctgtgattcagggaagattgtccgaaggctttcatgacggcagacgaggtcataaagtgccgctttcagcaatccttgatccaactcacctgacaaacggacagcaaccggaatattataagtaggactcggtccttccagacaatgcaggaaccatagccggcgctgggcaaatgagagcgggatcttttcaggccgctcagctctctgcaaagcgggacgtgcactctgcgccaaatcaagatgggcagcgagtccggctactgtcggttcgtcaaagagcttggcgataccaagttcggctcccattacctcgcgaatgcggctcatcagacgggctgcaagaagagaatggcccccaagctcgaagaaactgtcatcgataccgacgcgtgccaaaccgagaacctctgcaaacaagtcacacaatatctcttcctgaggagtccgcggggcccgatcactgacagatgtgctgaagtctggtgccggcagtgctttccggtcaagcttgccattaggtgttaacggcagctcgtccatctccacaaacgccgccggtaccatataatcaggaagactggcccccatataacgacgaagctctgcagtatcaatagcagtatcagcgactacataagccgccaatcgtttgtctcccggctgatcttcccgtacgacaaccgcggcctgttcaatgtgcgggtgattggcaagcacggcatcaatttctccaagttcaattcggaatccgcgaattttgatttgatgatccgcccgcccgatataatccaaagacccatcggcgcgccagcgggcctggtctccggtccgatacatccgagttcccggcggtccgtatggatctgcaacgaagcgctccgccgttaaatcagggcgatggaaataacctctggccaagccggttcctgcaatataaagctctccgacaacgcccggcggcaccggctgcaatccattatcaagcacatacacctgcgtgttccaaatcggtttcccaatcggaggaacgccctgcaacccttcttcaagaaaagctgcggcagaccaaatcgttgtttcagtgggaccgtataagttcgtgactgaacaatgaaggtcttgaagcgcctgcaaaagaccgctcggcagcgcctcgcctcctacaagcactctaagcccccgaagtttctcaggttcactcgttaccaaagcgtgccacagtgtcggtgtcgcctgcatgatgttaatatcgaaattttcaatcatttgagctaatgcctgcggctcacggatcgtttcttttcttgcgatcacaattcgcgctccgctaatcagcggaagatataactccaatgctgaaatatcaaaagcgacagtcgtcacagccaacagcctgtcttcttctcctagagaaaacgcctccttcatggacagcagaaaattgtttaagcttttctgtgtcacaacgactcccttcggtcttcctgttgatcctgaggtatagatgatatacgcaggatggtcaagagaaaccgatacatccggattttccggcgaatagcgttttataatctcctgtgtaacagcctgatcaagcacaagctccggtacagccaggttatcaggcagactggctgctatttcctcagtcgttatgatgcatgaaggtttcgcatcctccagcatgtaagaaatgcggtcggctggaaactccggatcaagtgggagatacgccgcaccagtcttgagcacaccaagcattgagaccaccatctcaggggaacgcggcagcgccaaagcgacaaattgctccggaccaatccctttttcgatcaacagacgcgcgaggcggtttgcctcttcattgagctttcgatagttgacttgaatgtcatcacacatgagagcgatacgttctggcgtaagaactgcctgcttttcgaacatgtcctgaaggctgaccagcttctcggattttgccgtctcattccatttagaaatgactttttctttctcctctggcaacagaagctccatttgcccaatcagcatgtcctctccggcagaagccgtttgcagcagctgcaaaatacgctgctgatgaagcttaatatcagactcactgtatacctcgggattcgcatcaacatcaattcgcagcccgctgccgtctgttctgtcatatacattgattgatagatcatcaacaggaccggctgaaagattatgcgttgtgccccggacgccggcaaagtcgagaccgtaatcaaacggcataagattgatttgagggccaaataatctatgattttctcctatcaatttcagatcgcgccgaagctcttcatggcgatacttatgatgtcgccgaatactgcggatttcccgggaaatttgctgaatcagttcagaaaagctcatcgaagagcttaccgtcagccggagcgggagaaggttcatcaccatagccggtacattcagtgacgcggaccctatccgacccatcatgggcaggccgagcacaacatcctcagagccggtcatacggtgcacataaacagctgacaccgcaatcatgacttcatgccagcttcctgagaaatagcgcgccgcttcttttaacgcgtttacatcagacggaggcagatatgccgtatgacgaagaaaactgttagatgttcttggcgcccgatcagccaagctcacaacttcaggtgcatctgcaaaacggtccagccagaattgacgatccttctcatactgctctgatccgcgataatctgtatcctcctccaaaatggcctggagagacccaaaggaacggcctttagctgtttgtccttttataagcgcagtatatgtacttgccacacgctgggctatcagggaaaaaccgaagccgtcgatcgctatatggtgaatgcgctgataccaaaagaaacgatcaggcccggcaataaacagagcttcattgaacaaagggtcataccctaaatcaaccggctttgctaaatcagctttcatccagtttaatgctgttttttccggatcaggctcagagctgacgtcaatgacgtgcagctgtacatccggagacgggtttatcatctgccaaggcccgtccatattttcaccgaagcggacatgcagcgattccgcttccttgatcacgtgccgcaaagcttcttcaaaaagagcaatattgactggtccattgatttctatatattccgctgtattgtagattggattgtccggatcaagctgctgagcaaaccatatgccagtttgcgccccggtcaaagaatattgaagatcttttgtatcaggcatccgtttgtttaccctccttttataaataatccgcgtttggcagcacttgctggctgcgggttgtgagcaatttttgccattcttcgatcgttgggcgttcagccaattccacgaaagtcacctctgccccttcacggcgccattgttccaccaatgtcatgatccttaccgaatcaagaccacgatcgagcaaatcctcttgatctgtgatgtcttccggtgtttcttgtagaagctcagcaatttgtttacggatattctcacatgtaaacacgttctttttgccagtgtttgctgacgttttttgaacgtctgccggcgcattctgcagctgatcaagaagactgtcagtcatcacggtaaacgcacagcgtccagccgcatagtccagcgccatttgatgtttttctaatgaaaaatcagcaactgcatctcccacaaaaaaggctttaatatcctccataaatgcttcacatgctgtaacaagacagccgatatgggcataaattcctgtaatgatcagctgatcgcgtccctctttgcgcatcatttcaagcagattcgttctcttaaacgcgctgtatctccattttgtcagcacaagatcatcatcctctggtgccagctcggttataattttctcctcataaggaccgctgtttaatcccgggccccaaaagtctgtcagcagcgcacggtcatccggattttggcttcccggctgtgcggtatagacaacaggaatcccaagctgaacacattgattcttcagctttcgtatattcgctgaaagctctattaccggagacgctcccgctgtgaaagcatcgacaaaatagttttgcatatcgtgtattaacaagacagcccgattcggatcaggcacccatgatactttgttttgcggcatatcagatgctgtcggcatttgatacggctgaatggcaggtatagccatatgaacacttcctctcaaattgttgttttatttttttaatcctgcaagaagcttctcggaaatggcttcacggagcgcttttttgctgacttttcctacccctgtctgcggaaaggattcgacaaattcaactcgatcagggattttatatgccgccagtccgcgctctctcaaaaatgctttgagctctgcggcttttggggcttcatcccggggaataatgaacacacaagatctttcgccaagaaattgatcaggcatggagaccattgccgcatcatggacagccggatgcgccagcagatgattttccacctcttcagccgcaaccttttctcctccacggttaatttgatccttcgcccggccttcaacgacaatatacccgtctcgtgtcagcctgacgatatcacccgtacggtaaaaaccgtcctcagtaaatgaagcggcgttatgctcttctgccttatagtaacctcgaattgtatacggtccccgcgtcagcaaatggcctgtttcaccaggttttacgtcgcgatcatgatcatcccaaacacgcacttcatcatatggggacatcggttttccttgggtgttgacaatgatctcctcaggatcatccaatctcgtataattgacgagaccctctgccattccgaacacctgctgcagcgtgcagccgaaaacagcttttaccctgcgcgcggcttcagcactaaacttggcaccgccgacctgcaacacttgaaggctggataaatcgtcacggcgtgaggatgccgcatccatccataccatcgcaagaggcggaacaagagcggttatcgtgaccttttcccgttcaattaaaggaaatgcgtcatctggacttggagaaggagataataccactcttcctccagcgtataatacgccgagaacgccaggtgagctcagcggataattgtgtgccatcggcagcgcggccaagtacaccgtgctgtggtcgagccagcagacctccacactccgcttcaggctgtatatgtagtcatcgtgggtcctcggaatcagtttcgatagcccggtgctcccgccagaaagctggaggaacgccacatctgaagatttgacttcaggcagttttacaggttctgtatgcaaatcctccagcggcaaaaattcctctgcctcacctgcgacaatgatgtttttcaaagtcggcagcttgctttgaacctgtctggcaagcgaacggtagtcaaaaccggaatatgcgtcgggaatgatatatgcagccgcttcagcaaactcgcaaaaatatgtaatttcactgcttcgatgagaaggcagtgcgaagactggaagcgcccccagacggaatagcgcgaaaataacttcaaaaaactctttgatatttggcagctgcaccacaacacgatccttctgttgaatgccgagcttctgaaatccggcagccaggcgatcagcccttgtgtccagctctcgatagctccaatgggtgtttccgcatgtaatggcaatgcgatcaccatatttggctgcccggtcccttaacaaatctccaaacgtctcaccggcccagcagccgttctttcgataggtctcagctaactcatcaggccaaggcgtaaatcctttcagcatgttgtatccctccagcaattcattctgttcatatgtgatccacgcccattgcccgcagcattgtccgaaactttgcggacgtctcctgaagctcgtcctcgggctttgaaccggccacaacaccagctccagcatacaggcggagtgagcgttcttctgcttctgcacaacggatggtcacgatccattctccgtcaccggcatcgtcacaccatccgaccatgccggtaaagaaaccgcggtcaaatggttcaatgctgagaatcgcttctcttgcaagatcagtcggtgttccgcagactgctggcgtcgggtggagagccgctgccaattcaagtgcggttacagacgggtcggaaagctctcccttaatcacgctggacaggtgccacatcgtttccgttttgatcagtgaaggcttctccggaacctccagcgtccggcagaaaggtctcagcgctgccgcaaccgcgtcagcgacaaccgcgtgctcatgaagatcctttgcggaagaaagcaattcagctgcccggcgctggtcttcaacaggatcattactgcgcggccttgagccggctaatgggttggaaacgacctgtgttcccatccttgaaacgagaagctccggacttgctccgagcaatgttcggcggggagacgtttcctcctgactggacacgtctgcggcaaacgtgtagccatgcgagttatgctgagccagatggcgaagcaattcatccgtctgaatcggttcaggcgatgtcaaatgcagcgacctggacagaacgattttgctgagtgttccatcggcaatgcgtgccagcccttgttcaacaccatttttataatcctcaggttcaggaacaggctttatgtgatatgtatgcccagcctgctgttccttttcctcatgatcaaattgaagcggtcctgaccagcgcacttcttcaggtacaacgagccgcgctgcttttacttgatcaaaaggaacggccccgacaacaagcggccggctttgccctgattgttttgcctgacgtaacgcctctgcaattcggccagaaagggtttccatttggttttgcccgtctgcctccggtacgatttcacatatgcctttcgctaacagtacacgatgaggagacgctaagaaaaaggcgcccggctgatattcatgaagcaaatgctccgcttttgtttctgttataacgttttgatccaacattctcatgaacctcctttaaattcagttacacgcctaaggtcgcgccgccatctacgcataaattatgcatcgtaatatgccctgcctggccagaaaccaaaaagagcaccgcatccgcaatatccgaaggcttggctagttttttgagcgggatccctgttttaaatgtctcaagtgatccttttatgacttgctccgctccattctcgtcggcccataatgaccactgcatgtctgtttccgttgatccgggagatacaatgttgcagcgaatattgtattctgcaagctcaaggccaaggcatttcgtaaacatcacagccgcagcctttgaggacgcatatgccgccatagatgttcttggtacaccggcagcattcgatccgactgttacaatcgaacccgatcttcggtccatcatatatttgctgactgaacgcgaggcgttaaatacgccagtcgaattcactgagaacgtcgcctcccattcctcatcgctaagcgaatggatcagtcccgggcgaaggacacccgctacattcactaaaatatcaatcggccccatttcacgttcgatgcgcgccgtgatctcatcaatcgccgcgctgtctctcacatccgcaggaaaagcttctgcatggcggccttctgctttgaggctgctcacaaccttttccagcttttcaggattataatcaaccgccgcaatatgtgcgccttgactagcaagcgtccgcgcaacagcttcgcctattccttgggcagcccctgttataaaagcaatttttccctctatactctttgcattcatatcatcaattcctttcttcgctctaaatgccgaacagacatccagcgaaaaagactgctgcgccttgaaaaacgcaatctattgataatgattatcattatcaattataaaaataatcatatccaaatgtcatgtgacagtcaaatataatttcagtgacaaatatttttttaaaggcaaggctgagtatgtctcagcccattgatagatgcggtccgtcagggtgaagcgcaaaacgcagcgccctgctgaccaaaacaggaagaactgaaatatgtccttctcctgaaaactcgcaaaattctgcccgtatgccttgttcagataaaacggccagccgctcataaagctcccttgcattatcattcatccggcttttatgatgctgctctaattctcctgcggcaagcaggatattgataggctgattgtttttcttggtgagagagacgaaatggtccgttttctcgagaataaacggtttattccaatgaatggacggacttcctgcgatatacgtttgaaacgcatcgggctttgttagcagcacctgcagcacgaaaagccctccgagcgaatggccaaagattgtttgtctttttttatcaatctggtaatctcgttctatctccggttttaaatcctcttcaataaatctgaaaaagccctccgctccgccatgctccggccattctctgccgtcgggcctttccggcagcttcgattgggctgttggcattgtaaaatcccggtggcgtgctgaagagaacggctccgctgtctcatagccaatgccgacgatcactgcagggatcaccccggttttttcgggtcggcgtccctgtattcgaacggcttccgtcatcgttccgaagacagaattggcatccagcagataaatcacaggataaccagtgggtggcggcggcgtactaggtttcgagataaaaatgtgataggtacggttttcattgcgtgaagacatcatacgcacttccgtaccaggaatcgtaaatgcgtttgatgtcccgctatttgtccggtctgttgtttgctctttcatgcagtacgacattcctctccttaaactaaaccgcaatgtatgataatgattttcactatcaactagacacctcaaataataggttttcttccaaagaaagtcaactttttcccgaataaaaaaggcaccttgatcaaataaggtacctgcagactatcaatatggaagtaaaaacctaataaagatgcggattgtcctatttgaaatagaaccttaatcccatgtaaacctttgattttgccaagggtcgcctctcatgtgatagccattccgctcccaaaagccagggtgattttctttcgtaaattggatgccgcgcagccacttggcgcttttccaaaaatatagatgcggaaatacaccccgcagcggaaagccgtgttcaggggttaaaggttcgtcattatgcgcataagccagaagggaagtttccgctaagaaatcatcaagcggcagattggtcgtccagccctcttcagcatgtaaaataacgtagcccgcttcttcttttacacccgctttttccgctatatcacaagcccgcaccccttgccacacattatcaagccttgaccatcccgtgacacaatgaatgtcgttttttgattcataccgtggaaaggctttgacatcttcaaagcttagcagcatcggatggtcaaccaaaccgtatacttgaagattccatttcgtcatatcttcgtaatatgggacatctccggtatgaagcacaggaaatgaagtggtgacgttttgatttggcggcactcttccagattgatcggactgtcttgtttttccgaaatacatatgggcctcctttttgttaacctattttaaaatcatgttgacaatctttttgttctttattactctatgattgtgtatgtcaacctaagggggaacaacgatgaaacaacgtaaacttcgtgcgggagatatggcgctgattggcatgttcgccgcacttatggctgtcggggccaacattacatcagtagcaccctttttacaagtagccggcattccgctttcgatgcagccgtttttctgtctcttggcagctttgcttcttggcagcaaacgagcagcgattgccatgattgtatatgcacttgtgggattggccggagcgcctgtgtttgctcaattttcagcaggcttcgcaccgtttgcagggaaaagcggcgggtttattatctcatacattccggcagcatttgtagcgggatggtttttagaacgaaacattcagccaagtaaaattcgatttctcattgcttcacttatcggaacggcgatcatgtatctcatcggcactacctatatgtatcttgcactgaagctgtggattcatacgccagtgagctacggcacggcttggggctttatgatttggtttatggtaaaagatacagcgctggctgtgatactgtcgtttatcgcaccagcaatctaccgctctattcataaagcaaccggctttaacagaaatcacatatcatctacgtaaaaaccgttctattggacggttttttatcataacgagaaaaggctccccagtaaaggggagcctttttcctataaaacaagcgctgcaatccagccaaagatgacaagcggaatattataaaatataaatgtcggcacacaagtatcccaaatgtggtgatgctggccgtccgcactcaaacctgaagtcggcccaagcgtactgtcactggcaggtgaaccggcatcgccaagcgcagcagcagccccgataatcgcaatcgttgccatcgggctgaatccaagctgcatgcatagaggcacgaaaatggttgtgataacaggaatggtcgcaaaagaagatccgatccccattgtaattaataagccgacaatgagcatcagcaatgcgcccaaggactgactgtgtccgataaaaccagctgacgttttgaccagtgactcgacatctccggttttcgtcaatacgtttgaaaatccggctgcaacaagcatgacaaagccgataaaggccattaaaaccattccatcagtaatcagtgagtccgcttcatcacgcttcatcacaccgctgacaaacagaacaatcagaccagcgagcgcccccataatcattccttctactcccaaagtctgagataagtaaagctggacgccgagtgacacaacaatggctagaaccgcgataccaatgctttttctcgtatatggcgatgcttctgcacctgaaatgtcttttgtttcatattgtttcggtttacggtatacgatcactgataaaataaggccgacaaccatacctgcaactggaataatcagtgcgtacggaatatcagcaagcggaacgtttaacccggcatccgccatattgtccttcagcatgccttggaagatttggccgaaacccaccggaagcaaaatataaggagccgttaagccaaatgtaattacacacgcgatcagacggcggtccatttcaagttcattaaagattttcaaaagcggcggaatcagcaccgggataaacgcgatgtgaaccggaacgacgttttgcgaaaaacaagatacaattaaaataatcagcacaatcagcaccttagaaagtgctttttttcgagaatcttccttatttccgattaatttaacggaggcttccaccattgcgtccggaagacctgttttcgtcaaagcggcggcaaacgcgccaagcatggcatagctgactgcaacggtggcatttccgccgagaccgtctgtaaaagctttaaccgtttcgccaagaccgagcccgcctgttaacccgccggccaaggcgcctataattaatgcgataacaatattgacacgcagcaggcttaatacaagcataagcaggactgcgatgacgactgcattcatgatgatacccctccaaaaatcctttagtttgctaatgtagtagataaataaagtacgaacgtatcgtatcataaccgatccactttagtcaactaaagatttcggaagaaaaaatccctgccgcatcatacagcagggatttttcattactcgtttttatcttcttccaatgtaaatcgctccgcaagtgtagccagtgttcttgccataacgccagtagccccggccggcccgaagcaggttgctttattggcagtcgctgttcctgcaatatcaaggtgaacccaaggtgttgactcagcgaattcaccaagaaacgttcctgccataatcgcatgtccctcgcgtcccggtgaattgttgagatccgccatttggctgcttttcacgcgttttttatccttctctgttatcggcagctgccagattgcctcgccgcactcttgtgcagcatcagctacctgctggtaaaagctttgatcatttgtcattgcaccggttgtttcagttcctaatgccacaacgacgccgccggtaagcgtagctacatcgacaagaactgacgcgccatgctgtttcgcgtatgtaatgccatctgcaagcactagccttccttcagcatccgtattaaggatttctattgtttttccgcttaaagatacgatcacgtcatccggcttcatggccccgccggagatcatattatcggttgatggaataacgcacagcacgttttgctcaggacgaagctctccgatcgtttccatagcaccgagaaccgcagctgctcctcccatatctgatttcatgccgacaattccagatttcgttttaatggagtagccgcctgtgtcaaaggtaattcctttcccgactagtccgacgacgtcctcccattcctttttgccctgatatttcaacacaatcattttcggcggttcggtggagccttggtttaccgcaagtattccgcccataccgagctcttccatctctgatttctccaatatctcacactcaaaatcatatttcgccgcaagctcttcagcatacgaagcgaggtcagtcgctgtcagcatgtttcccggcatattcacaagcgttctagccgaatttgtcccttgtccgtatgcctggccgacgcgaagcccggcctgcacttcctgtgtatcttcatctgttacaacatacacggcttcaatttgtttgtcaggctcatttgatttgtgcttataatcctgcacctcataggaagcaagcaggcagctctcagctaaagcatgagcggcatcggctggaggcacgtcttccgaaataaacgtatcaagcaggacagcagtttcttgttttcgatctttatgaatggcttgaaaaacatgagcaaaacgttccttcgcctgttcaaacgaataattagcttctctccccagaccaacgaaataaatccgtttcatacccgcagaagatggagggaatacttttgatacttgattcggtttcgcagagacatcaccctcttttaaaagctgtgtcagatggccttcgagcatttcatcaatttccaacgcttttcctgtcagctggcttttttgaaaaagcccgaccacaagggtttctgtatgctctgattgttgaaccgcataaaacatgaggcttacactcctaacgtaatgggtatttgtaatgaacaatggtataataggaaaaacattctttccactatacttattttaacaaacaacagtctaagacttgcttttttcttttgaaacacgaaggatttttcaaatagaaaggatgtcgccgatggaacttttaacgaattttcctttattatcaagcctggccgcaattatttttgctcaggtcatcaaagtgcccatacagtttatcgtgtccagaaaactggactggtcgctggtcacaagcacaggcggcatgccgagctctcactccgcagcggtcactgcgctttctacaggcgtagccttggagcatggattagactcctcactctttgcggtttccgccattttcgccgtcataaccatgtttgacgcaactggcgtcagacgccacgccggtgagcaggcaacagtcattaataagcttgttattgattttaaccgtttcgtaaatgaagcgaaggacttccctaaggctgcagagaaagaaaagcaaaaaaagctgaaagagcttctcggacatcagccgatcgaagtctttttcggaggcctaacaggtattttactgacattggtactcgcttactttttcatgtaaaaaaacgctcctgctttcgctggagcgttttattctttcacagttttatattgatttctgaacacttgcaaagattttgtttcattgagcttctcaagctcatcctcggtaatctttcccattccctttttaatcacatatacatcaagggtttttttgccccattcattgtatacatctttgactgtctcaaagtacagatcaaggcggtttcccttaatagctgatcctgtgtcggccacaactccgagaccgtagttcggaatgaataaaattgttccgatcgggaaaacggacgggtcagcagcaaccgtggaatataaatcccgtttcactttcacacctgaatatgtaagcccgtataatggatcaccgggatttttgcccgtcgactcagctcctgctgtgtagcctgttgctgttactctttggactggatattcatcccaatcaaatgcctcttctaacggttttgttttatcctcagccgcggacgtggtttgtgtttgtttctgctgcaatgcttttaatgtcagtcctgcatgcttcaagtgcttttcctgatgttcctgcacccattttgacaagtccttcgcttcaattcctgacactgataaaaatgtcgtgccaaatgcaagcagaaataaacaggtcatcagcaaacgtctgatcatattcaacatcattcacctctcctccgaatcattgttcccaagtggagagagcattattcaaaatggtgaatgagctgaacgcataaaaaaagctttctttagaagaaagcggcatttaaaacatttgatatcctctttttctgagcatgttgatcgctataccggacacgatggcgccggccaaaccgctggctaaaatcagcacatcggcagccgctaatgataagacacgatgaaacagactggcaaaggattctcccggcgactggacatagctgatcagcttttctttgctgataatgaaaaggcatacaatcggataaatcacagccataatccaagacattctcagcagcatgtttaataagaaaccgattccaaaaaacaagacaaaaaacaaaacaattgagatgattacgactggcagactaatcaacctattccaccccctgcgttgtttttagtgtaacgcgggggctgaaataaagtcaacggctggaaaaagaatgactgtcttttcctgtcccctggcaagacggacaagtctctgaaccgccgagaatcaattgaaaatatcctttccctgaacaaaatgggcatgcatgtgaagcggttgtcgttgcagttttcatctaatcatcacccttttttctcaattttctgataatataccatatcaagctgtcaacaataaagtcagatcatgtgacaaatcttttgatgtaagcggaaacatacttgttttcctctcgttctctttttattttggcgttttttaataaagaaaacccgcttccgcgggtttttagaaaaacttgaacttgccttttttcaatgtcagtccgagtccgccaatcataaacagcgagcggttatcaatgacttttttcataaacgaagcgggcgtgcctttcagctttctgccataaacaaccccaaccgcgttatgctcgccaagagaagccactgttcccttaatgtccggcttgaattcctcaagctctccgcctttaataagcctgccaaggtttttagcgaccgttatgccctgctgcattgcaatttgcgcagtaggcggatacggacgctctgtatcttcattcataaacagcgagctgtcgccgagaataaagacattgtcatgtcccggggcgcgaagatcagggttgactttcacccggccgcgcatattttcaaaaccggcttcctccacaatcggatggccgcggacacctgccgcccaaacaacggtttgcgatttgatctgctctggttcctcatcttttttgccgactctgactccttccggggtacattcttgtacagccgtgccgatcttgaactcaactccgttttcctcaagataatgtacggcgtaatcaacaagttccggatcaaagcccggcaaaacggtcggcgctgcttccacacaaatgatgcggacaaggcttctgtcaacgtcatattccttacagagctccggcacgcgagcagccagttcgccaagaaattcaattcccgtaaatccggcaccgccaacaacgatcgttaacctgtccggccgtttttccgcttccgtattgtaagtcgcaaactgcagctcaatatgttcccgcagcaggcgcgacgtgttgatgttggcaatcggaaacgcatattcttttaagcctttaatgccgaacgtttcaggcacggcgccgagcccgatgactaaataatcgtactgcagttctccattcgcaagcacaacttttttctcatcaattttgattgcctttacggtatcctgtacaaaattcacccgtgactggttgattacatcttttatctgataacggcagcggtcatgatggagcgtacccgcgctcgcttcatgcatccatgtcgtttcataatgataattgtgtttatttacaagcgtaatgtcagcatcattcggcccgacatacttcgtcagccttgtcaccgtcatcaatccgccatatcctgcacctaaaatcacgattttgggcttattcaatgccatcacatccaccttctctttttttgcttttgttagacccataataaaatcatcatttgtgttagcttcagcttattggcgggattttatgaaatatattgaaaagttttttgtgaagtccttacccgtagcactattatcatgtttatccggctggcccaagaaacattcagaaaaagatcatttcatttggttattatcgtagcggcctgcggaaatattttcaagaacggatgggcacgttagatccttacgattttttctgctgactcgtcaatttgaacggcaatatggtataattaataacaattttcatttaggaggcaattttcgtatgcgagaggatacaaaggtttatgatattacaattataggcgggggaccggtcggcttattcaccgctttttacggcgggatgagacaggcaagcgtcaaaattatcgaaagcctgcctcagctcggcggacagcttagcgccctataccctgagaagtatatatatgatgtagcgggattcccgaaaatccgtgcgcaagagcttatcaataacttaaaagagcaaatggcgaaattcgaccaaaccatttgtctggagcaagcggttgaatctgttgagaaacaagcggacggcgtgtttaagcttgtaacaaatgaagaaacccactactctaaaacggtcatcatcactgcaggaaacggcgcattcaaaccgagaaagctggaacttgaaaatgccgagcagtatgaaggcaaaaacctccattacttcgttgatgatctgcaaaaattcgccggcagacgcgttgcgatccttggcggtggagattccgcggttgattgggcgcttatgcttgagccaatcgcaaaagaagtatcgatcatacaccgccgcgacaagttccgtgcgcacgagcacagtgtggaaaaccttcatgcgtcgaaggttaatgtcctgacaccattcgtccctgcggagctgatcggcgaagacaaaatcgaacagctagtgcttgaagaagtgaaaggcgaccgcaaagagattttagaaattgatgacttaatcgtcaactacggtttcgtttcatctcttggaccgatcaaaaactggggcctggacatcgagaaaaattccattgtcgtgaaatcaacaatggaaacaaatatcgaaggcttctttgcagcaggtgacatttgtacatacgaaggaaaagtcaacctgattgccagcggcttcggtgaggcaccgacagcagtgaacaacgccaaggcttacatggacccgaaagcccgcgtacagcctcttcattcaacaagtctttttgaaaataaataaaaaaaaggagcttgtgtctgcgacacagctccttttttatttgaagatatttatataattcaatgcagttcctacaaccagcgcaatcacaagggctgcgactacccagatcattgccataataatgcggtcctgaatcttttgggacttcggtgttttttcttcgttttgggccatcttattcgctcctttcctatgtccatgccataaagaaagcctggtgctgaacgaccaagctttgctgaacgtatatcattcgcgttttgatccgctctctaagaccattcgttaaaactatgatacctaaactcaccctgcatgacaagcttcggcacttgcaccacacctgccagcaaatcataatgtttgacatcctaaataaaacagagtacattatagaaggcgaacatttcatatattatacttttaaatattcgtttttaggagtgaaaaccatggaaaacgtatttgattacgaagatattcagctaattcctgcaaaatgcattgtgaatagccgttcagaatgtgatacatccgtacgtttaggcggacgtacatttaaattgcccgtcgtccctgccaatatgcagacgattatagatgagaagctagcgattcaattagccgaaaatggctacttttatgtcatgcaccgatttgagcctgagacacgaattgattttattaaagatatgaacgcacgcgggttattctcttctatcagcgtgggcgtcaaagatgaggagtatgaatttgtccgccagctggcagaagaaaatctgactcctgaatacgtgacaattgacattgctcacgggcactcaaatgctgtcattgaaatgatccagcaccttaaaaaacatttgccggacagctttgttattgctggcaatgtcggaacgccggaagcggtcagagagcttgaaaatgcgggagcggatgccactaaagtcggcatcggaccgggaaaagtatgtattacgaaaatcaaaaccggcttcggcacaggcggctggcaattagcggcgctgcgctggtgtgccaaggctgccagcaaaccgattatcgcggatggcggcatccgcacccatggcgacatcgcaaaatcaatccgattcggcgcaacgatggtcatgatcggttcactatttgccggacacgaagagtcgccaggccaaacgatcgaaaaagacggaaagctttacaaggagtacttcggctcagcctctgaattccaaaaaggcgaaaagaaaaatgtcgaaggcaaaaaaatgcacgtggcgcataaaggctcaatcaaggatacactgattgaaatggagcaggatcttcaatcttctatttcttatgcaggcggaacaaaacttgacgccatccgcaacgtggattatgtgattgtgaagaattccatttttaatggggataagtactaatatgcgaaaagcacccggatttgggtgctttttatgtgtaaaaaaatgttatatggtatattttagtaataaaaaatccttgtttctacattctttcttatcgtatcttagcgtcccccaaaagcttgtccaattaaacttgaaacatcctcctcggccagttcgatttctagtcggtgttaataaatacatgacatcaaattttgaaataagtaactccatttttataatttttccagtagtttcgtaaaacccacctagactccatacctcctattaagaaaaagttatttcattttccaaattatacatttataaacttgtcttcttttccactcgattctttagccatctatatacatttgctatattaatttcaaaaccttttccctctaattttgttagagccactgctcctccaaatacctcttccttatcttcctcttctgatagagcttttgttaccagagaagcttgaagtattgttgaatcaattatcctttgttgttgctcaaccaaagtttgaagttgttcaattgtttgagtttgcaactgcactgttgcatttaaaaatattatctgactcttaaaatgctggacgttagccattaattgctgaatttgaaggtcacttgagaagttcgtatatccaatatcatttaccattgatggtagctgcaaataaatttctaatgcttcttgtataatgtttaaagcttcatctgttgattctggaattactgtaaaaagtacattatttgcttgatgcgtaatttctgtagttgctttaatacctatattctttaagaattccgaaaaataaataagatattgttcacatgcaacacgaacatgttcagggaattcaaagatactagttagagtaccttccctattttttaaaatcaactgatttattgcttctcttgttacattgttagcgatacgtaaatattcttctaaacaattattagaattattattacaaataaactttaaggaataaccatatatatcagattcaatggtaatatccatccgttttgcgacatcattagcttcatatattaattcttctgtactaaaaatatttttccatttttcagtttcccaagaaaaatcaattaatatttcaaacattttatcatcaggtgaaaaaataaaaaatatactttgtttcaaaccagtaatatccaattcagttgggatttctattgttactgattttttatattcatttgcaagttggatcttattaaatggcatactggttatacttgaaacaacttcatttgcaatgacttcaaaaataatctcaattttataagtgaagagtttcaccttttctggttccatgatttgtttattaatttctaaaaaaggctcacccttataatctttaattataatcattatcttctcctcctttcagacttactttcatcgctcctttagcgctctatatatagtcgtttgcttatattatttaaactgtattaagcttattctcccttttattcctactaccgaataagtctaagggcatgttgattttcttttagtatatttcccctgtctttatttgtaaactcctctcttcttaacttcttcaattcatttgggtgcatcatatttaagataattggcataatcctaaaaattcaggagaataagtcgtttacatttcaatctcgtagtgtttgtgaagccaagtaacaaggagctccaattttactctcttaaggtttcctgtctcaagccttttgcatttttacctgccataactacgccaatttcttattccatagttgatttgtaatattaatttttggctgttttcttcctaactcttatttaataagaaaacttctagatatttatgtgattgacattaaatccagaaggattgtaattcacaattcttattatattttgcgcactaaacctcagaattcctcaggcccacctacatttgttgctttcttgaacaaagaatcgcagacgcagacgaccagtttacgatagatgaaaatacgaccatagcaaggtttatatacgatatgcacaagtattggtgttcgctatcctgccgccgaagtattcccctaactttacctaggttacatacactttaaagtacaattttcacaatatgaaatctctatcccgctctttaattctttctaaaaagaaatacttatatatttttcaatgcttttccattattcttgccatttgttttgcatttggattttcttcattttgcaactgttcaatgatgttcatataatccgtttcatttcggttctggcttaatttatatgccgcttgaatgtcttccaccttaatcttaaatccaacgatacctttcaattcacgttctaagagttttggagaaagcttatcccataaaacaggattgtcacgatgtttttcgtatttctccagcatgattgttaattcttctgctaattcatctttctctaacatacttgcttttccatacatgtggacagcctgataattccacgtcggaacattttcgcgcgaataccaggaagaagaaatataagcgtgcggtccctgaaacatcacaagcacatcttcacaggcttcaaacgttctccactgaggatttccataagcgaaatgccccgtaatatagtaatgatcatcttttttattgaatcctaacggcaaatgtgtggcaattggttttccttgttctgttgtgacaaccgtaccaaaggagttttcttgtacaaaattccaaatttcttcagcatttgtgactttaaaatattttggaatatacatcatcatccacccttcgaaaaatattatatgagtgttttagccatgattaaatccgtttgttcttcatcacccatataaaaagagtgggcgccggtctgaacaaaccccattttcttataaaaggcaatagcattttcatttttttcccacacacctagccaaatgttctttttattacgttccagcgcaatttctatcgctttattcagcagatgtttgccaagcccatttttttgaaagctgttctttatataaattctctcgatttcaagtgattcagcacccatttcttcagactgagcatcatcgatattgacctttacatatccagcgatttcatgatcaaagtaaataaaaaagaattgcgaagacatattggataactctttttccagctgctcagtgttaaatgcactttctaaataggctttcatattttcaggtgagttctgttctttaaaagtgtcattgaatgtttcaatactcaattgttgaagtgtttgtaaatcttcccggctgcattttttcatttttacactcattgttcggattcagcccctttatttaaaattcaattgtcttgtgtccctttttaatatatttaaacacggaacagatactgaccttgttaccattccaaaaatcttcttcatcatcaactccctatcgtgattttgttgcaaatgcaataaaatataccccgcattaaatatagcgtaactttgctgtatttacaacaaaaatcaaacaacaaatcagcgtttctcttgccgaagtccccggtactctctgcatcatttccccataataaaaacgcctcccttaacgatgatttatcgctaagaaaagcgtcagtaatagttgctatccgtttttagtgcttagcactcttcaggcttgcctgcattcgttgctgttctgaacgaagaaccgcagccgcatgaagcgatggcgtttggattgtcgatggtgaagccgccgccgagcatggattgtttataatcaatcacggtgccgttcatgatgtcaaggctttctttgtcaactagaacagtgatgccgtgctgatcaaacacactgtctgattcactcttttcatgctcaaagcccatgccgtaagaaagtccgctgcagccgccgcctttgacgcctacacgtagaaacgcgttttcttcttcatgctctttcatcatatcttttatatgcaaagctgctgcttctgtaattgttaccgggttgctcatcattgtgaacctccttttaaaaaccggttgctgtcttttattataaacatgatcgtcccaattctcaaacaaggtgttttacaagaaatagacaccctcacaaacggtttcagccggccctgtcatcattacatggccgttatctttccagtttatcaccaaatccccgcctgctaaatgcaccgtgatgtcttgatttcgctttgatacgccgtttaatacagatgcgactgccgctgcacatgctcctgtcccgcatgcctgagtaatccctgatccccgttcccagacgcggaaatgcaattcttgttcattcacggtttcaacgaattccacattgatgccttccggaaatctcggatctttctcaatcaccggccccagtgtcgttaagggtgcctgttcaatgtctgcgatcggaaaaacgatatgcggatttcccattgaaacggcagtgcctgttagttctacttcaccaaatgccatcgtttcattgattgtgtgctcttccccgccgtcaagcatcgggagctcggattttgtcaagcgcggttcgcccatatcgacagtgaccacattcacttttccgttttcgacttgaacctccgctttcacaagcccggagagagtttcaatcagaaaagatgtttcctcaaccagcttatgctcatatgcgtattttgcgacgcagcgcaggccgttgccgcagtttttcccttcagatccgtcattattaaaaatccgcattttaacaggcgcttggtctgatgggcatatcaggatcattccgtcggatccgatccctgtataaacagaagaaacctgaattgcaatctctgacagtttttcttctggaagctgttcttcaaattgattcacataaatataactgtttcccaggccgtgcattttggtaaatcgaaatgagttcataggtgcctccaactttttttctttttcttagtataaaagctattataagcggacacaatacaattatcccccgtttttcatacataaaagctccttgcactgacgcaaggagcttttatcgtttatataaacatgccggcaatggctgcgctgagcagattggctaatgttcctgcaagaacagccttcaggccgagacgcgcgatatctgaacggcggctgggtgctaatccgcccagcgtaccaagcataatcgcaattgatgaaaaattggcgaatccgcataacgcgaaactgataatggtagcagttttcttagaaaactcgccgatgtgcggaccgaagttagaataagcgacaaactcattcagcaccaatttctggccgatatagcttcccgcctgcaatgcttcatgccaaggcacgccaatcaaaaaggcgataggagaaaacacataaccgagaatggattctaatgttacgccttttaaaccgaacaagccgaaagccccgccgagaataccgtttactacagcgattaacgcaacaaacgcaagcagcatcgccccaacgtttaacgcaatttgcagtcctgttgacgctccctttgcagctgcgtcaatgacattggctgcgccttcgccttcatccattttgaaatcgctttttacggtttgcgttttttccgtttcgggtataatcaatttaccaaagactagtccagctggagcagccataaagctggccgccagcaaatattcaatcggaataccaagaagcgcgtacccaaacaaggtagatcccgcaactgccgatagaccgctcgtcataatcgtaaacaactcagagcgcgtcagcccggcaatcaggggtttgatcactaacggagattctgattgtcctacaaaaatattggcagcagccgccagagattccgttttgcttgttccaaggagcttcgacaatccgccgccaatgacacggaaaacgagctgcatgattttcaaatgatataaaactgcaatcagtgctgagaagaaaatgataacgggcagtacacttaatgcaaaggccggactgtctccgacctttagaagcggtccaaaaataaaactgatgccttcattcgcatagtcaatcagaagctgtacacggcttgaaaaccataaaaaaacagcgcgtcccgcttcccatttcaacacgatgtatccaaacgccacctgtgtgcataaaccaacgatgacggttcttatcttaatattgcttttcttttctgaaaataaaaacgcgatagcaatgatcgcaactgcgcccagcagcccccacagaacattcatgaatactcgtacacctcttaaattttatttaaaaaaatatcttttatacgataacaataatattttttgatgtctacacatttttttagttcttttgtacagcaaaataaaaaagggcctgtccaggcccttttctttaaaacattggattttcttcaataaaggtatatatattctcaacaagctcagcaggcgtttcacccatgacgacttctccgtttaccagagcgaaaagcgattccatgcatgtcccgcagtagcttaagcagccatattcaaggacatcaaggttgggatccttctccaaaatcgcccgggcttcctgagagccgtgagccagattgctgacacaaaattcaatcattggattcatgcggtttcacctcacatatgtccattatcgcgaatttttcactattcgtcaaagacaacggatgattcaaaatttattatcgtaacatattatttctcaaataacgttttactaatttgtgttttcaggctaaattgtaggttattttgaaactattattgtgattttagatcaaattcgatataattctagatgttattttacatagttcgtattttcttcaatgtatctatcatactcttcggattaaaggggaattcaaatgaaaaaattggtcttgatcggcggaggttacgggaacatgcgtgttcttcatcgcttattgccaaaccagctgcctgatgatgtttcaatcacgttaattgacagaaatccttatcactgcttgaaaacagaatattatgcccttgccgcaggcacaatttctgaccatcatatcagagtgtcattcccagagcaccctcgcctggatgtccaatacggtgatatcacatcaattgatattgtacaaaaacaagtgctgttccaagatcgtgaaccgatttcttacgatgacgccgtaatcgggctcggctgtgaggataaatatcacaacgtgccgggagcgcctgaattcacctacagtattcaaaccatcgatcagtcccgcgaaacctaccaaaagctgaataatctgagcgctaatgccaccgtcgccattgtcggagcgggcttaagcggcgttgagcttgcaagtgaattgagagaaagccgtgatgacctgaacattattttgttcgaccgcggtaatctcattttatcaagctttcccgagcgtttaagcaaatatgtgcaaaaatggttcgaagagcacggtgtccgcattattaacagggcaaatatcacaaaagtagaagaaggcgttgtgtataaccacgatgatccgatttctgcagacgccatcgtgtggacagccggcatccagccaaacaaagtcgtcagagacttagatgtggagaaggacgcacaagggcgtattgtattaacgcctcatcacaatcttccaggtgatgaacatctgtacgttgtcggcgattgcgccagccttcctcatgcaccgagcgcccagctggcagaggctcaagcagagcagattgtccaaatcttgcaaaaacgctggaatggagaagccctgcctgaatcaatgccgcagtttaagctgaaaggcgtcctcggttcactcggaaaaaaagccggcttcgggcttgttgctgaccgtccgctgatcggccgtgttccgcgtatgctgaaatccggcttgctgtggatgtataaacaccataacggttaatgatagagaagaaccgctgatcaagtcagcggttttctgtatacccatgcttctccatttcctcataaacgtcttttaattttggattgccttcaccgacaattttgtcttctacgagcacaagcggataaaaatactcgtcatttctgattttttccgcaagctctttcgcatgttcattgtcaggcggctcatgaatatcgatgtactgcatctcaaaaggctgatttggatattttcttttcagcgcagcctcaagccactcgtatgtatccttggctgtcggcatattgacacagctcgcacaaacggtttctgccccgtacacgcttagaatgactggtttcatcacttgtagacgcccccttctcctatgtaagtcctttcttttaagtatacagagccaaagggcgtttttatagaaaaaaaccgtttttgtgttgaagtctgaatgtgctataatagggagagcaactttgcaaaccaaacaatagatttttattgttacactgaatataatggttttatgacgacgaaaggagcgaatgtcatgactgaagttgaaatgaaagaacaggtgcaggaagtactggacaaacttcgtccgtttttacttcgtgacggcggtgactgtgagcttgtagacgtagatgaaggtatcgttaagcttcgtcttctaggcgcatgcggcagctgcccaagttcaacaattacgctgaaagccggaattgagcgcgctcttctagaagaagtgccgggtgtcgttgaagtagaacaagtcttttaataaagcagccaggctgatatttgatcagcctggctttttttattagagatattggtcaaaccatgagctgatataattcaggcgcttgatccgctgtcttgggtgtccggtgcgtgacaaattgtgcgatgcattcggaaaacggacaagcttggtttccttgcccatttttttcagagcgataaacagctgctccgcctgctcgatcggacatcggtcatcccgctcgccatgcagtatcaaaagcggtgtctccacgtttgctgcgtattttaaaggagaccggtcccagagcttttctgtgtcctcaaacatgtcatgctcaagctgccagtctgtaaagaaatagccgatatcactgacgccgtgaaagctgatccaatttgatatcgagcgctgggtaacggcagctttaaagcggttcgtctgcccgacgatccagttggtcataaaacctccgtagcttccgcccgtgacaccgagccgcttaggatcaatatgcggatctcgtttgatagcctcatccacagcctgcatcacatcgtcataatcctttcccccataatctcctctgaccgcattcacaaattcctgcccgtagccgtggcttcctctcggattgatataaacgaccgcgtatcctttcgccgccagcacctgaaactcatgaaaatatgtatgtccgtacatcatatgcggaccgccgtgtatgttaagaataagtggatatgttgtctcaccttccatttgtgcaggcctcatcagccagccgttcaccatcacgccgtcttctgtagcatattgaatctcttcaggtattgatatcgtatgctccctgacaaacttgtcattcgcgccagtcagctgtttctcttcctgtccaagcgggatactgtaaagctcactcggtctgtccggctttgtcacactggcaataaagtgctgttcatcaggtgaaagagaaaagctattgatgtactctttttccagacgaatcggatacacaaggccttcaatcgaaatataatagatgcccgtactgccttgatctgtgccgatgacataaaacccttggctgtcctttgtccaaatcgggcgctgttcagcaccaccgatcaatgaatctccaatcagcgcatccgctaaatgaacgtccagcatctcagtaagacatgtgaggcggccttgttcgatatcatagagccacgcctttgagagcgtagcattcttatattccttttcatttccaagcaaagcaagataccttccgtctggtgaaaatgagcttgatccgaatgagccgcgatgaggtgtaacctgcttaagatctccagactccagtgacattatgtaaacatcatgcggcttgctggcatcatctgtttcagttaaattagctgagaaaacaagccatttgccgtcaggagaaaaagcaggatcaccatgatcagctttgtgacttgtcagctcttccatctcacccgactttacgctgacaagcacaagctgggcatacgcacctctcgtcagccctttgccgtcccgtttgtaggagaggccttgcacttcaacaggttcatagctgtcctgctctgttttttctcggtcatcaatgttttctccctctcccaaactgacagtgaccagaatcgattcgccatccggggaccatattggctttgacacgccatacgggatatcagtcagttttctcgcttctccgccttcagcgctcatcatatacagctgtgccgcatcgccttctcgatcagaaataaaggcaagcgtgcacccgtccggagaccatcttgggtcggtgcttcgcttttctccatgtgtccaaggaacagacccgcccgttttcgtttcatagatccatatatttgatgtatacgaatctttctcttgattcacttgtgattttacatatgcggcacgggtgccgtctggggcgtattgaggatcggtcacagagacaatcgctgtgatgtcgtctgcggttatcagctttttcatattcatctcctcctttttacatgtatttcgtttttctaaataaaaactcctttatctccagcaaaaaaagcgccctctgctgacgctgaggaacgcttggcatgatctatacactttttacttgatataaaggatttcgctctattatacttccctctttcgggacggtcaaagcgtctacttcacaatgagggaaatgaagcgcgagctgttcttttagctcttctccctttcctttttcggtcatgacgagaatcgtcgggcctgctccgctgagagccgttccatatgcgcccttcatctcggcgacgtgctctacttttgacagctcaggcacaagcatcgcccggtacggctgatggaacatatccttcttcatgattttcccgacaagcggccaatccttggacatgatcgcagcaatgagtatattgctgacagcacttgcttttacggcgtcggcatatggaaactccttcggaagcacgtctctcgcgtctcttgtcagcacttcgtaaaaaggaatgacaacgactacgtcaatgtcagcattcgggacgcggatcatttgggtctcgtcatcctcatgcaggccgatcacaagtccgccgacgagagaagcgccagcattgtccgggtgtccttcttctagactggctaaatgcagcttgtccgcttcagacagctttaagccgcataattcatcagccagttcaatggccgctacaatcgccgcggcgctgctgccaaggccgcgtgcaagcgggatgtcgctccacaccttcacatggacaggaggtatttcttttccgtacaaatctgcggtccgtttagccacttgatagatcaggttatctgtacccgccggaattccggcgactgtttctgtttcagcctcaaaagaccatttgtcgctttcaaagacggtcagcttcaaatatctgctgagcgccattccgactgaatcaaagccggggcctaggttagctgtgcttccgggaacagtgacagagaacagcatgtcggcttcgttcatacacgggccgctccttttacatattcaaggatgctgtcttcatcagtcggcaatgtgacaggcttgatttctgaaatgtcgaccgctgtgttcggatctttcagtccgtttcctgttaacacagctacgaccttgctgcctttcggaatttctccggatttcacctgtttcagcactcctgcgatagacgcgcaagaacccggttctgcaaacacgccttctacacgggcgatcagctgatatgcgtgaaggatttcatcatcagtgacttcgtcaattttcccattggattcctcggctgcctttacagctttgtcccagcttgccgggtttccgatacgaatggctgtcgctattgtttcaggattttcaatcacttcattgcgcacgattgccgccgcaccctcagcttcaaagccacgcattttcggaaggcctgtgccgtttttctcatgatattccttgaagcccttccagtacgcagtgatgtttcccgcgtttccgaccgggatcgctaaaacatcaggcgcttcccccagctgttcgcacacttcgaaggcagcagttttttggccttcaatgcggtaagggttgactgagttgacaagggcaatcggtgatttctcacagatggaacggacaattttaagcgcatcgtcaaagtttccgtcaattgcgataatctcggctccgtacatgacagcttgagcgagttttccaaatgcaatttttccgttcgggatgatgacaatgcatttcatgttagcacgggctgcatatgctgccgcagcagcggaagtgttacctgttgacgcgcacataatcgtgtcattgccttcttcttttgcctttgccacagccataaccattccgcgatctttaaatgatcccgtaggattgacgccttccgttttgacatgaagctcaattccgagctgctcagacagcttcggcaggtgaataagaggtgtgtttccttcatgtaaagttagcgccggtgtttgatctgttacaggtaaaaattctttatattgatggataagtcctttccacattagctccaaccgttcccttctacacgatatgtgcttttgacttcttgaacgacttccaaatcatttaggttttgcaggatatcactgaaatcagcttctgatgtatgatgtgtgacaattacgatttcagctaactcatcatggcctttaattggcagctgaaggattttttcaaagctcacgccccgctctgagaacacagatgtaattttcgagaatgaaccaacctcatcttttacatgaattcttaaaaactgctgtgcataaatgtcagacggcgatttcatgtttttctcatattgcggtccgacaaagctgttgccggttacacctaggcgcatatttttcatgacagcgacgaggtcagaaacaacggatgtcgctgtcggcatgcttccggctcccggcccgtagaacatcgtctcaccgacagcctcgccgtatacataaacagcgttaaactcattatgaacagcagaaagcggatggtggtcaggaagcagtgtcggctgtacgctgacctcgattttgctgccgtcacgctgagcaatcccgatcagcttcattgtatagccgaggcgtttgctgaagctgatgtcctcgtctgtaatttgggagatcccctttactttgacgtcttccagatccacgttcatcgagaagccgaggcgcgccaatatcgccattttccgtgcggcgtcaagcccttccacgtcagaagtcggatcagcttcggcaaaaccgagatcctgcgcttccttgagcacttcctcatatgggcttttctctttgatcatttttgttaagataaagtttgttgtgccgttcacaattcccatcatttttgtaattcgatctgatgagaggccttcctctaatgtgcgcagaatcggaatcccgccggcaacactggcttcaaagtagatatcgcatccattttccttcgcttcagcaagcagctcggagccgtacacagccattaagtccttgtttgctgtgacaacatgctttttcgatctcagcgcgtcgaccaaatattgttttgtctgttcaacgccgccgatcacctcgatgacgacatcaacatctggatcatcaatgacatcatacacttctgtcgtgagcacttccttcggcaaatctacttctctctttttctctatatcttttacaagcactttttttatcgtaaccggacagccgacctgatgcataagcttatcctgatggtcttgaataattttaacgacaccgcttccgacggtacctaaacctaaaagccctacacgaatcgctttcaaaaaaactccacctttcttttgattgtcctcttgaaaaagacaattgttaactcaacacagacatataagttacaaacattatataagcccgctcctgttttgacaagacagcattaggctgaattttgcgaatgtaaacgcttaacgcattgatatgacaagattctttattttctaattatttttgtcagattttctcctcaccctgagctgcctttgccgagccagctgacgcgtggaacaaacagcttctgcgcccgcatattcatgaattcctgcgctgtattgagaaattgttcataacgcccacagtcattaagaatgaagacaagctgttcttcaaaataatgcttttctgattctgatgacatgtaatagctttctacgatttcaaaataatgaagcgggaaaagcagacggctgtataaaaggcgtttcgaaaatgaagacagcggtgtgacttgctcgtattcctgtaaaaagagaaagccctgctgattaaaatcttgtctgtgatgcaaaaacgtatgcctcatatattcagccaaatcacgggaagcgtggtcaaacacccaatccgccggaatcctgatcaatgattccggtgaccatgtatgcctttccatccgctgatggcatatcgttcctgaatcagcggcttggggcttgtcatccagctcagtgtccactaaatattgtatcgcgttttctgacagtcctaaataatagggaaatgattcgatcatttttttatcgaatggctcatgcggaggggtctgaacctttctctgccaaaatgcttccagctgatcaattcgttttccccacagatccttccactggccgattcttccggccgccttcacctcatatggatatcctcggccttttcggtgaaattccgcaagctccgctccaatggagaacgccctgtttgaataagggggggccgccttcagcagagcgtacgtttttccctcatgttcaaatgtcagttcaccttcttttgtaaagataaaaaccgaaacgtatgggtcactttgttcttgtaaatactgactcatgtaataaagctccgccagctctgtttctgagaattgggaaacggggacaatcagaaagtatgaattaggcgtctgaaagcattgatatgtgtgctggtacatggaaagctgcctgatgtgaatgccgtatttttcttttattgtacctttcaccatgatcacctgcctgttgaattagggctcatcacatcgtagtcatacacagccggaattatgaatacatattttaatccgaagaaggcgcaagaaaaagtcgtaaacttctcaagcattttgtataaactagtaaaaaagattgggtgaagctgatgtcagaaaacgaacaattcagtcagatggaagctaaagcaagagcacggatgaaggagcgcggcgttgaggtatcagacattgccgagcttgtcttttttctgcagaaaaaatatcatccggatttaaccattgatgaatgcacgctgaacgtcaatcgtgttctcgcaaaacgcgaggtgcaaaacgcgattttaacgggcattgaattggatgttcttgctgagcagaaaaaactgtctgaaccgctgcaaacgatgctggaaatagatgaaagcctatatggagtagatgaagttctggcattttccattgtgaacatttacggatcgatcgggtttacgaactacggttacatcgacaaagaaaaacccggaatccttaaacgattgaatgataaatcaaccggtgaatgccatacctttttagatgacatcgtcggagcgatttccgccgcggcttcaagcagacttgctcaccgcgcgcggcatacagaataagggcacccttttagggcgccctttattcaaatgtatggaatccattcagtcagagagtcaatggcgtgagtcggtttttccatatcgtctgtcatatgttctcttttcgttacgcctgtgtgaacgagcagcgtatccatacccgcgttaatgccggccataatatcagtggcatagttgtcgccgaccatgagtgtttcagacacatctgtgccgagaacgcgcatcgcctgctccataataattgattccggcttgccgataaatacaggctgtacacctgtagatacggttaacaccgatgtcagtgagccgtttcccggcagaaggcctctttcagtcggaatcgcaatatctccgttagtggaaataaagcgggcgccatttctgattgccaggcagccgacagcaaatttttcgtatgtaatggaacggtcgatgccaacaacgacaaagtccgcgttttctccgccaaatgtcaggccgttttcttcaatcgcctggcggattccttcctccccaatcacatacacagacgcgtcttttttctgctgtgcaatgtgctgggcagttgccatgctggtcgtgaagacctgctcttctgttgccggaatatcaaaagacacgagcttgtccgctacctgcttcggtgtgcgcgaagagttgtttgtcacgaaaagataaggaacgccgcgatctttcagcgttctgacaaattcacacgcctcctcgattttttccgtgccattgtacattgttccgtctaaatcaattaaataccctttatatgttttcatatccaacactcctgtggctttccagttgttatttaaacgcggaaacaggtcctagctctgtttccaaatagcttctgatccgtttcgggaagtcctgaagagctgtttgatgcgccttgatcagcctgtaaagctcgccgctgtcagcgagcagatactgttgaaccaacgttttgcggtaggcgatcaattttttgagctcatcaccctctttttccgtgacaactttctcatcaacaagtatatccataatgtcgtcatagctgcccgggtcccgcataataaagccgtcaatcatgtcattgcctgtatccaaaatgcattcgattaacagatggcctatacgctgaagtgccaattccccgatttcagactgccagtctgtttgtgagtcaaatagcgccagctggtgctcgaagaaccctagtgttttctcgattttgcttctgtcaacaaaatacatgacagcatcccctttgtgtatatttattttctgatccgtttcaagacaaaatacgcacagccgaaattgcagtattcgtaaatatattcatctaatgtgctgattttcgtttcgaaggttgccttttgattctggtcgtcaaagaagcccttgagccttaactgaccgtatccccagtctcccacaatataatcgtatttatttaatatatcggagtagcgggctttaaaagcctcttcgttgaagccgtctttgaaattgtgcaccaattcaaattcggcattttgaataagaatcatgatctcacctctttttcactcattcctatcataattcattgccccgtccccatcaattgctaaagaataaatcatgcgatttggctaccctacacatgaggagggattgataaatgaaacgaaccgctgtcagcctctgcctgctaaccggactattatccgggtgcggaggcgcaggattggataatgcccaaaatgtccggaatcagacgcagaatcaaaccaaacccgttcatgtgtcggaccgcaacgaggcttttaacaggcataatgagaacgaacaatttggctatgtccgctatcaaaaagaacaatttgacggagaccagcagaaaacgccggtgatgaaccgggaagaaaccgctcacatgatatcaagtttaacggttcagcttccccatattcaagatgctgcgacattggtgaatgaccgagaagcgcttgtcgtatacaaaaccgattctaaaaaccgggagctgaccgccgatcaggtgaaaaaaacagcggcttccgtgataccgcgatactatcacgtgtatatttccgataatccaaaccatatgcagtccgtcgaaaattacagcaatctcggctctggttcaagggatattagagagatcatgtcggggacgattcaagaaatgaaaacctccccgcaaggaagccctgtctcagagaatgaaaatgccaatggagaaacgcgtcaggacatgaaaatcgataggaatgacaaaaacgccagatgatctggcgttttggcattatgcttgggcttgacgctttttagatgcttcgtttacttgttcatccgcatggtaagaggaacggacaagcggaccggcttcacaatggctgaagcctttttgcatcgcgatttcttttaattctgcaaattcatcaggatggtagtatttttggactttcaagtgtttcttcgtcggctgcagatattggccgattgccataatatccacgttgttcgccaagaggtcgtccattacttcaataatctcttcttttgtttcgccgagcccgatcatgatacttgattttgtcggaatgtcaggctgcatttccttcgcacggcgcaaaaattccaatgaacggtcgtacgtcgcacgcgcacggactcttggcgtcaggcggcgaaccgtttcgatattgtgattcaggatgtctgggcgtgtatccattaaggtttttaggttatcgtagtttccgcccatatcagacggcagcacctcaattgttgtgaacgggctttttctgcggatcgcacggacagtttccgcgaaaatgcctgcccctccatctttctgatcgtcacgcgcaacagccgtaataaccgcgtgcttcagattcataagcgcgactgaatccgctacgcgttccggctcttgcagatcaagctcagttggaaggcctgttttgacagcacagaaacggcatgctcttgtacaaacagaacctaaaatcataaatgtcgctgtacgtctgaccgcccagcattcatgaatattcggacactttgcttcttcgcatacggtatgcaggttgttttcccgcatgagttttttgagccctgtatagttttcatttgtatttaatttaattttaagccattcgggctttctgaggtgttcgtctttctttgccaattcccatcatctccaatatccaatatactcaatttctgacacgaaacattctgaaaacgagaaaggtgcagattttagttctgcaacaaaaataatgtttttctaactaaagaaagtcttttctttagacactttaacataggaaaaatttctcgacaagggaagatgattactgacatttttaagccgggttgccgcaaactatgtgtattcaatatgaaaggagattattttgtgaaagttttgttatccgctcttcttctccttttgtttgcatttgagccttctgcgtctggaaaaaagctttcagatccagtgctgtcgaaacggatggaattatatcataaaatcgaagctgtgacgcagatcccttggtatgcgctcgcggctgttgatcaatacgaagaaaacgtgcggagcaaccggaaagatctgcctgaaaaggcgggaatcatcagcatctatatacccgatgatatctggagcgggcctgaaaacccgaatccgaaagatgatgcgccgttaagcattaaagtgtttgacggaatcggaatggatggcgatggagacgggaaagccgaggtcagcaacgatgaagatattttgtatacgttcagccaatacctactgtcgtatggcacagatgaagacaacatccggatcgggctttggaattattaccggcgtgatcagacagtggggattatatctgaattcatgaagctgtttaaagcctacggccatattgatctgggcgagcatgcattcccgcttccgatcagaaccgattacagctaccgaagcacgtggggagatgcccgcggcttcggtggaaggcggattcatgaaggtacggatatctttgcccattacggccttcctgtcaaatccacatgttacggcgtagttgaaatgaagggctggaaccgcttcggaggatggagaatcggcatcagggacattaacaatacgtatcattattttgcccatctcaatgggtttgccaaagggattaaaacaggacaaatcgttgagcctggccaagtgatcggatcagtcggcagctccggatacggcccgccgggaaccgccgggaagttcccgccgcatttgcactatggcatgtacaaagataacggaagaaccgaatggtcatttgatccatacccgcatttgagggcgtgggagcgatatgaataccaaaaaaagaagtaacaaaaagccgcctcttcaacaggcggcttatttgctgcttttttctttttttgaatcggcaccgtcttctttgctgctcggaagctggacagaaggcgtgacacccgagccgccgcttccattataaaactgcggcacttcgccctgcactgctttaatcgatacaggaacattatttgtgacgacagcggttttgctggcaaatggaatgatgaccttcactttaatttcgacaaagatgctgatatcaataagtgcgttatttatgccatacggcttgattttggttttgacatctgtaaaagcgtcaccgattaaattgaaccggaccgggattttcggcccgaggtttccaagaaggctgttgccggttacctgtcccagcggaatgttgatcataatgttttcactggcgccgctgtgtccggtatgggtttccatctctttcaaatgagcctgaagctgctttgtcacttttgttttcacactgtttacaacctgtgtattaaaatcgattgtcgttaagtttccgttttcatcagaattcatttgaaacatatctttcatattttcactgtcagacatatagtcctcaatcgaatcctggatcacctctgtcgctatacgcttcgtttccatctcgccgatgtccattaaaacaggtttgatcgagccattgatcatccaaaggctgaccgttgttgacaggataaaaaagacaacggacaggagcatcacgtaacggaaaggcaaaggtcctctcttgcgaaaagggccgcgatatcttggcaagaaaatccccccttacatatcacaatgtatgcttgtaagaggggacatagtaatagccggggccaatttattttatttcatcatttttaaaagcgcttctctgccgctcatgccgactttgatgccaagatcttccgcagcgtacgtgacggattctaaaggtgcgtctaacagctggtcaatggtgcggacaccaactgcgcgtcccgccacgatgccgcgctcctttaatttttcattcagcagcgccacatcaagcgcgccgcacataatgtatccgtgatcattggcgacggccataaaattcgttttgggaagctttactgtcacagctgtaaaaggctgtccttctatcatgatcggtgtcaggtttaccacgtcaaccactcccttcattcatcactttatgatgaagggcacagcttgttgtgggctgactgccttattgtgcaagcttccaagcaagcagatcccgcaaaaattccggcataaaatattctttttctgcagcgtcgcgaatcaacggaaacagtttgccgagcgtaaacatatcaagcaccgcaacggagtattgtttatgtttttcaatatcttccccgttcagtgtgatccgagtgacgtgggtgatcccgtcatcgagccgtttcgtttctacctcaacgccggcatacaccattttccccatcacttctccgcggaagccgagtcctttgatccggagctgctccatttgttcggaagcggcatggacaatggtttccttcagttcttctcccgtcaggcggacagccaccgggttgatcggatgcggacagatgcggtgcagatccagctttgtcacaggacctgcttttagcggaccgagaatgacacctgaattgaccatactaatgtccgtctcgcaccattcctttaaggcgtatgctaaaagcaaaggcagctctgattcttcaaaccacttcacctcagcatcttgtgcaagctctgcaacggcatcggacagtttctcctcggcttcacgttctttttcattgagaaacgcttttgtttctgcggattctcctgtccattccgccatgttctgcacagaagccgttttgctaatgatgcttcgctgtacgctgtccaccgtgatttctacacagccgacataatggccgtatttctcggcgctggccagcagtaccccattaaccacttgtccatcttcaagcaaatgatgggtatgtgattcgaggattacatcaatctcaggcaccgcttcagccactgcttgatcatcaagaatgcctaaatgtgacagcagaacgataatatcagcctgccctttcacttccagaatggtttcctttatgctttcaagggcatccgtaactgtccatcccagcttgtcatatacaggataatacggcacagttacacctaagaaagcaatggacataccgtttttcaatgatttgatatggtaaggcaccgcccaggacggacggtttccatttttatcaaacaggttagagacgatgacaggaaattcagcatgatcatataagacagcaagctcttcatgcggaagcgtaatcccttcgttattgccgatcgccgctccatcaatgtgaaggcggtttaagagatcgacattcgcttttccgaatgtcgcctctgtcacgaattgaaaacgatcaagatgatcgccaatatcaaaaacgagcgtctcttcgccgtctgactgatgctcttttcttttctgctcgatataatctacaattttcggccagttttcaaaatggctgtgcaaatcatttgtatgatataagcggagcttctccttcataatatctctccctaatcgttcagctgaaaatgccttcataaatgagctggcagccgatcaaaatcaatacgatccgcatgatcataacgatcgttttcgtctgcatttttctgttgatggcggcgccaagctttccgccgaaccaagcgccgggcacaagcgcgagggcgtacagccaattgacgtgcccggaaatcatatgtgaaacagaccctgtcatagaagacaggaaaataataaacatggacgttgccaccgcaaccttcggcggaaacagaaataacagcatcatcgccggaaccatcagtgatccgccgcctataccgaaaagtccgcctaaaaaaccgacaacaaaggcaatggcaataccgacagaggcctgatatgagtacgtataaggctcaccggcatcatcctgaaatgtccggataattcctttgtgcgctttgttgattggccgggctttcgctttcagcattaaggataatgaaatcagaatcataaaaatgccaaaccaaacggaaaacgagtttgaattgaacagctttgacacgtaagccccgatcatgctgccgggacccgaaccgataaagaaaatgagcccgctcttataatcaactgttttatatttaatataagccaaagttgaagaaaggcccgtaaaaataatgaccaaaagcgaagttccaatcgcaacctgcggcgtcacatcctgaaacagctgcgtcactgtgcttaaaaacatcagagatggcacaatgacaattccgccgccaagcccgatcagacttcctaccgtacctgcgattaatcccaggacgaccaaaatcacaaacgacatcaatcaaaacctcttttctaaaataaatcgagctgtctcggagcaagtccgctgtactcgatatcaagcagttcaagcatctgcttgccattatccgcagcgtcaccgccggaattgttgttgaacaggacaaaaacatccttacattgctgctgcaatttattcaggtgctttttccaatcctccagctcctgttggttgtagcggtataagtacctgacctcccgccagtttttcccgccatcaggcttcatccagccctgcttgttgcgtccgtgaaacctgacgagcgttttgttttcatcggtcgcgcgcaacacggtcggaacgctgccttctccgatttgcggttcatcacagacactgtgaatccagccttccgctttcataaatgaaagcgtctgctcataaaatggcggcgagaaccaggaacggtttctgaattcaagcgcgcaaggaatatctcccatttggtgcttgcaccatctcaaataggcgacattctccttcttgcagtcaaaccacggcggaaattgaaacagcaccatggcgagcttattgctatgtaaatatggcgttaaagacaccttaaacgcatcaaacatctcctcttttgagtcaaagggaatttcgccgcgctgatgccctgtcatgccctgatatgctttcacgataaattggaaggtttcgggcgtttccttcacccacttttcattattgcgcgccggctgaatcgcgtaaaagctcgcgtctaattccacgatcggaaaatgggaggaataggcctgcaattttttctggctggccgttttcggcggatagatgctgtcatgatccccccaccccgtcagtccgatataaatcacactcattcacctctcttccagtttatcacacgtgttttcaggtttcctcggaaatgctgttcatatggcgggaaaatgcagaacgaagatgctgatattgttcctcattcgtatctaaaaacgcctcttctcttgaggaaggaatatgctgatattcaataggcgcctgaaactgctcactcgtaaaatcgtacatcacaccattgatgctgttgtaaaaatgccagctctcaccgacttttgttttgaaaatcgtgccgccgaaatggtcttgaatcaccaatgccgtcacgccgcattggccgcatgacgggcattcttccgtccatttagagctcgaatggcgcgaccaggattgcttaagtatgtatttgacatgctccattgcctccgcctcctttaaaaaaagataccacgttgatgagattttaaaaactagaacggaggaaatcaaaaaacccggcggtaaaatccgccgggcttacgaaggaacgaccagagctccgtcaatttcagtgaccttttccccatcattgtacacgcatcggcctttgctgtaagtggcccaaatgctgcagggaaatgtatgtccttcgtaaatgctttttttatgctttgcaaacatcgattctcttgtaacagtgtacggctccatgctgacgagcacgaaatctgcatcacaccccgcctcaagccgcccttttttctgaaggccgaatcgttttgcaggggccgccgctgtccattctgcgatggtttcaaacggaatctgatgctcaagcgccagttccagcattcctaataaagtgaactgcccgccgctgattccgccccatgataaaaacatgttatcctcccgcttcaaggatggacggcagggggaatggtctgaggaaaccatgtcaatgtccccggcaatgagcgtctcgatcagcgtctcttttgattgcagcgaccggagcggaggcgcgcattttgcgacagagcccctttgccgtaaatcgtcatggctgaacaagacataatgcgggcatgtttcaaccgaaacatcaagaccttcctgtttcgcctctctgatcagccggaccgctttcgccgtgctgatatggacaaaatgaaccggacaacctgtcaccttcgcatactgaatcgtgcgatacaccgcttcaacttctgcttcctccgggcgggaggcggcgtacgcatccgcgtccacctttcctttattggccaaaaccatctgcaagtagcttgtaatcgcgtcactttccgcgtggagagcgaggatttttcctgcagccgcgatttctgccatgcctttgagcaatgtccgttcatcaacagagcggaactcatcagtgcctgactttgataaaaacgctttaaacccgatcgctcccgcttcagccatcggacggatgtcctcgatatggcctggcacaaggccgccccatagcgcaaaatccacggcagatttttgcctgcctagctcagcttttgcgagaagatgctctgccgtcacggttgatggaatacagttgagcggcatatcaaaataggtggtgcaaccgcctgcggccatcatttgagaacctgtttcaaacccctcccaatcctccctgcccggttcattaaaatgaacatggcaatctatcacaccaggaaacacgtatttcccgtctgcctggatgatttccgtcccgcttgcttcaatgtcagaacctatctcggcaatgacaccgttttgaactgcaatatcagcttctataacgccatctggcgtaactgccttcgcaccttttatcaccatatcgtaagccatattgatccccccatgtaaggatgacgatttttcatgtcagtttatgtaacacaaccagttctattttcaacagtttactgctactatgatcgtattacatcagcaaaaccgctagaattcctattgaaaattattcaccttaaccaatgtttttatagaaaaggagaatgcgctatgaatatttttgatgtgatgaaaataccggcttttaaaaacgccaatttaatcgctggaaaagcaggaggggaaagagaggttcagcatgtcaatatgatggacgctccggatatcgcagactttttgcataagaatgaattgctcgtcaccaccgcctatcacctgaaggatcacccgcatcaattatctgaactgattcggcaaatggcaaaacgcggctgcgcgggcctcggcattaaaacaaagcgctatctggaagatatcccgaaggaaatcatcgaactggccgattcatatgcgtttccgatcattgagcttccggaacacatccgactcggcgatattgtgaatgccacactcagccatattctcgatatgcgttctaacgagctgcagcaagctatttacgcgcacaaaaaattcacaaaccacattatgagcggcaaggggctgcaatccctcctcaaaaaggtgtcagacctccttcagcttcccgtgctgctgcttgaccagcatgccaaaatgctgtctgcgtctcatcagatttcagttgagaccgaaaagctgaaaggcaccctgaataccgtatccgggccatttttcacttgtttctctacaatctcagatcagaaaacatattctgtcctgcctatttataatcacgaaaaaaactgcggctacctgctgataccggacatggtgcaggcaggcgacaaaggattgatcctcacgattgaacaagcggccaacgtcatttcctttgaactgctgaaggaaaatgcgctgaagcagttcagccggcgggcccgcaatgagtttttcaacaattttattgagcggaccttttcttcagatgacgaaatcaaaaaccgggcgaaagaattcaagctgcgctgggatcaaaaatacatgtgcatcgccggcaaactcgatcgcaatgacgaatcaatcagctttacagaaaatcagctcgcttccgacagcgtattcgaatttcttgaaggtgaattatcagccttcccgtttccgcctcacttctttatgaaaggaaacgtcggcattattctaatcgaagcgacagacagctggagtgaaatgcacgcctcggtgatcagctttttagaacagttccaaacacaggtcagcgctcaatttaaacgaaccgtgtcctttggcatcagcaatatctgccaaaagctcattgatgttcccgacgctttcacagaagcttctgatgctctgcaatcggggcatttgtcgagaagcaccgcatttatccaggtgtatcacgccaaagatgtgcctgagcttctgcgcttgctcccggttgaggatttgaagaaattttacaactccacgcttcagagcctcgctgaaaaacagcaggaggatcaaagcctgcttcatacgctttccgtctatttagagacacactgccaaatttcagagacggcaaagcgtctgtacgttcatcgcaatacggtcatataccgccttgaaaaatgcgaagagcttctgggtaaaagcttaaaagatcctgaaacaacgatgcgtttgcggcttgccttacgtatgcagcggctgatcagctaatgctcgttacattttcttacaaaacgaatcatttttcgtcactttcagcaatcacacctgtctttttcagctactgtatccaatgacacccctcgatcggcacgatatcatgttactaaagttcacatacagggagggactatagtgaaaaaaagatcgtttaaggtgtttacacttagcctgcagcatgtgctcgccatgtatgcaggtgcgattttggtgcccctgcttgtcggcagggcgctgaatgtaacaactgaacagctgtcctacctattggcgattgacctgttaacatgcggcgtcgctacgcttttgcaaaccttgcgcggaacatacatcggcatcgggcttcccgtcatgcttggcagttcatttgtggccgtcaccccaatgattgcaatcggcagcaattacggcattcacgcgatttatggttccatcattgcggccggtgtgttcatctttttgtttgcgcgttttttcggcaagctgactgtgttatttcctcctgtcgtaacaggtaccgttgtgaccttgatcggcctttcacttgttccgacaggtgtgaaaaatatggctggcggcgaaaaaataaacggcagcgccaaccccgaatacggttcgctcgaaaaccttcttctctctgtcagtgtccttgttctgatcttagtcctcaaccgctttctcaaaggatttgcccgaacactgtccgttctgatcggcatcgccgccggaacagcggcagcagcgatcatgggcaaagtcagcttttcttctgttacagaagcaccgttcttccaaatcccgaagcctttttacttcggagcccctgcgtttgaaatcggtccgatcttaacgatgctgatcgtcggaatcgtcattattgtggaatcaaccggcgttttttacgcaatcggaaagatatgcggcagacctttaactgaaaaagatctcgtcaaaggctatcgagcggaaggaatcgccattctcatcggcgggctgttcaatgcctttccttataatacctttgcgcaaaacgccggcttattgcagctgaccaaagtgaaaacaagaaacatcgtcgttaccgcaggctgtatccttgtctgtctcggactgattccgaagattgccgcccttgcatctgccgttcctgctgctgtacttggcggcgcgaccgtcgtcatgttcggcatggtgattgcctccggcgtcaaaatgctcagcacagcggatctcaaaaatcaataccacctcctgaccatcgcatgctcaatcgcactcggcatcggcgccagcacggcccccgggatttttgctgaattccccgctccgattagaattctggtcagtgacggcaccatcactggcagcctgaccgccatctttttgaatctatttttcagcttgcgcgacaaaaaagaattaacagcacagcaaacagaacttccagtattagaacatacactcgcattagaaaaagaggtgtaaaaaagatgaaggaacagcacaatgccttacagctaatgatgctggggcttcagcacatgcttgccatgtatgcgggagccattctcgttccgttgatcgtcggagcagcgatcgggctgaatgcggggcagctgacgtatttaatcgcgattgatttgtttatgtgcggggcggcaactcttttgcagctctggagaaaccgatatttcggcatcggccttcccgttgtgctcggatgcacgtttaccgcagtcggcccgatgatttccatcggaagcacttacggtgtcccatcgatatatggtgccattatcgccgcaggactgattgtcgtcttagccgcgggcttcttcgggaagcttgtccgtttttttccgcctgtcgtaaccggatcagtcgtcatgatcatcggcatcagcctgattccaacggcaatgaataacctggccggaggtgaaggaagcaaagaattcggctcactcgacaacgtgctactcgggtttggcgtcacagcttttatcttattgctgttttatttctttaaaggctttatccgctccatagcgattttactcggtcttatcgcaggaacagcggctgcatatttcatgggaaaggtcgatttttctgaggttttggaggcgtcttggcttcatgttccgtctctgttttatttcggaccgccaacctttgagctgccggctgttgtcacgatgcttctcgttgcgattgtcagcctcgttgaatcgacaggcgtttattttgcgcttgcggatatcacaaaccgcagactgtcggagaaggatctggaaaagggctaccgggcagaaggccttgcgattttgctgggcggcttatttaacgcgtttccctatacagctttctcgcagaatgtcggcatcgttcagctctcaaagatgaaaagtgtcaacgtcatcgccatcacaggaatcatactggtcgcgatcgggctggttccaaaagcagcggccctgacaacagtgatccccaccccagttctcggcggcgcaatgatcgtcatgttcggcatggtcatttcttacgggatcaaaatgctatccagcgttgaccttgattcgcaaggcaacttgctgattatcgcctcttccgtcagcttggggcttggcgctacaacagttcccgcgttgttttcatctcttccgggcgcggcctctgtcttggcaggaagcggaattgtgatcggcagtttgacggccattgcactgcacgctttttttcaaaccaaacagccgaatggcacagacataaaaacgtaaaggaagatgccaatgttcacaatggatgacctgaaccaaatggatacacaaacactgacagacacacttggctctatttttgaacactcttcatggattgcggagagatccgcagcactacggccgttttcgtccctttctgatcttcaccgcaaaatgactggcattgtaaaagctgcggatcgcgagacacagcttgatttaatcaaaaagcatccccggctcggaacaaagaaaacaatgagcgatgactcggtacgagagcagcagaacgcagggctcggcaaattagaacagcaggaatacgaggagtttctcatgctgaatgaacactattatgatcgcttcggctttccttttattttagcggtgaagggaaagacgaaacaggacattcaccaagccctgctggcaaggcttgagagcgaacgagaaacggagttccagcaggcccttatagaaatttaccgaatcgcccgctttcgtctggctgacatcatcactgaaaaaggagagacgcaaatgaaaagaaccatgtcttatggcaaaggaaatgtatttgcataccgaacgtttttaaaaccgctcactggagtgaagcaaatcccagaatcatcttttgccgggagaagcaattccgttgtcggcgttgatgtgacatgcgaaattggcggagaagccttcctgccatcatttacagacggagacaatactctcgtcgtggcaacggattcaatgaaaaactttatccagcgccatctcgcatcctatgaaggaacgacaaccgaggggttcctacactatgtagctcaccgatttttagatacctattctcatatggacaagatcactctgactggtgaagacattccgtttgaagcaatgcctgcatatgaggagaaagagctcagcacaagccacctcgtcttcagaagatcgcgtaatgaacgaagccgctctgtgctgaaagcagaacgaagcgggaataccataacgattacagagcaatacagcgaaatcatggatcttcagctcgtcaaggtgagcggcaactccttcgtcggcttcatccgggacgaatatacgactctcccggaagacggcaaccgcccgctgtttgtctatttaaacatcagctggcaatatgaaaatacaaatgactcatacgcttctgatccagcacgctacgttgcggctgaacaagtccgcgacttggcgagcaccgtttttcacgagctcgaaaccccttcaatccaaaacctaatctatcatatcggctgcagaatattagcgaggttcccgcagctcactgatgtcagcttccaatctcaaaatcacacgtgggatacggttgtcgaagaaatcccgggctcaaaaggaaaagtctacaccgaaccgcgcccgccatacggtttccaacattttaccgtgacaagagaagacgccgagaaagaaaaacagaaagccgctgaaaaatgtcggagcctgaaagcctgatgggaaaactgacaacccatattttagatttaaccagcggcaaaccagcggcgaacgtaaaaattgaattgaagcggctgggcgaaagtattttgaaagaggtttacactaacaatgacggcagagtcaatgtccctctgctggctggtgaagagctggtttccggagagtatgtgatggaatttcatgcaggagactattttgcgaataaaaacgtgaatacggtcgaccagccgtttttaaccatagtcaccgtccgttttcagctagcagatccagatgcacattatcatatcccgctcttgctgtcgccgtttggttatcaggtgtatagggggagttaagaaggaagcccgcctcaccggcgggcttctatttgcacttcaataaacttttgatcctaggacagtacttgaagtgatccccacacttagtgaaacaacagctagaataaacattcacctatatttttcaggataattgcctacgagaaaaatatcctgtagtcctttcatttataaatcgaggtttcaaactaataagtcagctcttagcagccgagctcccttctccaatcctataaacagaccgcgttttttctcgaaaaaatactctgaagacaattgctgcgtttttaatagttttgataacgcgttctctcttacacctttagacaaaatattcattttttcttttttagacttaaatctatgtcgaaaatgatcgttggcatatcttatactatctccactaaaggaggtgacattatgggattctacaattctggtggatacagtggaaactctggttactcaaacggtttcgggagctccttcgctttgatcgtggtgctattcattttgttgatcattgttggagcagctatctttaattattaagtttaactttccttgcctccgccgtatccaacacctccctgtccgacagacgccataagaagtttttatggcgtctttgctatgtgttcactaatctttttctaatcagctttcaagttctacgagatttatcgtgtgttttcccacaacgcttctgcgtcttgatcgcgctgtctgactgaggctaaaaaagtccggcttttaaaagccggactcccgtctacccccgttcaactctcttctaatcctgcaagctgaccgcataatcccgccgtacccggtacaccggcacaaattccccgccagcccttcttctatatcttcgtcagaaggttgaggggtttcccgaaacagtgctttaagcgcaattatcattcctggggtacagtagccgcattggaagcctccttcttccagaaaagcggtttggcagatatccagttcctcttgttgtacgccctcgattgttgtaatggaatggccgtccacttgataagccatggtcatacacgcattggccagctttccgtcgattaaaatagagcaggctccgcagcggccgattccgcaggacacctttgtcccggtcagctgaaattcctttctaagcaggtcactcagatgtgtcgtaggaacggcagcaacctcccactcctgcccattcacggtcatccggaactgttccttttttacaggaaatggcccggcctcttttacgtccattgcttcagcccctttctgtctatcgcttcaagcagctcttctcttgaaatcggcagcttgtttatccagcatccgaccgcatcatgtactgcctttacaatcgccggagtgatggcgattgttccgatttcgccaacaccgcgcggtccatatacgtctcccttcattaagtcttctattgcaatcaccttcatgtcaggaacatctttgattccgggaatcaaatagtgatcgagattttccgcagcataacggccatccgtcattttcgcttcctccatcagtgtgtagccgagtgccatggcagcgccgccttcaatttgacctcgatatccctgcggactgatgaccggacctgccgcaatagcgtgctcacaatctatcaatttgacatcgcctgttaacagatctacctccacctcaacggcagccgctccaaatgagtagaggaaatggccgcccaccacaggatcaggcgttgttggaaagtcaaatgccgtttcctctgccaaagggcctttttcagccagctccttatacgtcaccacgagcgcctttgtgtttttgtcacgcaagcctgcagcgccgggaataagattttccgctgaacagccgctccattctgccgcccgttttttcaactgagctagaaacggcttcttcaaacgctggatcgcgtgccacaccatgcttgtgccgcgggatgctgtggaggagcctgacttcggcacttttgcggtatccccaataacaatggaaatatcctctgcggcacaacctaactcctccatgacaatctgttcaatcgctgctagaatcccctgtccgcattcttcaaatccaaacgaagcagtgattttgccttcactcgaaagagacaaacggcctcctgccgcatccattcggccataccccagcccgccgccgtgcattgtaattgccgctcccgtgcctctttgcagatacccgcagttccggctgcttcttgtaagaatgggagatttagatatggcattcaacacctgtgccgctccgtcagtcggtgcaatccgatgctcaagaggccccaagtcatgcggttttctgatattttttcttctcagctccagcgggtcgatgccgagcatgccgctgagacgatcgagatgggtttcgagtgcaaatgtgatttggttgccgccaaagccccgaaattcccccgccaccccgttgttcgtaaatactgatattccttcagtccggatattcggaatacggtacggccccgcggcatgctcgacagaaaaatctagaacggcaggcccaagcgtggcgtaagcgcctgtgtccgccacaattttcacgtcgtgcgccaatagatttcccgaatgatctgcacccgtttttatcgtaatcttcatcggatggcgcttaatgccagaacgtacagattcctttcgtgtctgatggattttgacagggcgtccgcttttcagggccaaaagcgcagcatacggctgaatattcagctcatccttccctccgaacgagccgcccatcggacttgacacaattctgatcttctcttcaggaatatcaaaaatacgggcaagctggaaacggtctttatagccgtgctgggttcctgcatacatcgtaaaacccccgtcgtcttccggaacggctacgcctccctccgtttccatatacgtatgcatctgccgcggcagctcataggtttcttcaaggactgtgtcagatgcttgaaacccttcttccacatcgccgtttgaaaaaaatgcgcggtggaggatattcccgtcctcatgcagtctttgcgcattcggccgaagcgctttttctggtgaatccatgacttccagctctttatactcaactcgaatcagctccagcgccgcttccgcgatttcttctgtttccgcagcaactgcggcgatcgcatccccgacataccgcaccctgtcctcacataaaaccggctgatcagggatgacaatgccaaatcggtttaagccgggaacgtctttatgtgtgacgacggcctgcacgccttccattttctcagcttttatggtgcaaaccgacacaatctctgcatgaggataagcacttctcagcaccttgccatacagcattcccggaaagctgagatcggtcatatatttcaattcccctgtgaccttatcccttccatccggcctgactcttgacggtttgttgatgatcatttattcccctccctcagccatcagctctgccatgatgacgttggcagcggctttttttctgtatgccgctgacataaaagcatctgaggaaaacggcagctcatggataagtgttttgtacagctcatgcgagtcccaccctggtgccatccatttcgcttcgctgtccaataatctcctaggagtgatatcggcatggccagcggcgaggcgaatgccgccgtctttcaaaaaacgtccagctgcaacagcaaccgctcctgtaaaagcctgacgccttccaagcttgtgataaaatacacgctctccctccgcccgcgggatgatgacacgcgtgacgatagccgttctaaagtcttcctcaatgagccaagcgccaagcggcagcctgattagcttcttttgatatacgataagatcagcatcaagcacaagcagaagcggaatgaaatcaccgattttactcgctatgttgccgccaatcgtggcacggctgcggattcccggtgcggcgacagcggaagcagcgtcactgaaacagccaagcgtgctcttgatcaaagggttctttctgcattcactcagtgatgtgagcgccccgatcgacacgtgggtgtcactggcgctgatccctcgcatctcgtcaatcccttcaaggctgacaaggtgctgtttcggtagagttcctttgtcccactgaagctgaagcagcgtgcttcccgatgcggcacacacatccggagcaagcttctctaaaagcgaataggcctcatcaagcgctgccggcctccataattgaatattcatccttgcttttgtcacttggccgttcaagccatcgccctccttaccatgtcatattcctcgggtgtatcaatatcgtccaactcgccgctatcctttgcctccaaaaccgctcctgctccaagctgtccgcttttcaggagcctgcgagccccttcatctcccgttaacccctttacataaggaaaacaagccgacgagaagtagattggcggggtgaacgcccctaaaaacgatgacacggcaaatggctcaggggccagtgccacaagggcattgagatgatcgacggaaagctgaggctggtcggctaacaaaatgacaacgccgtccgcccccatgctttctgcttttctcaccccgctgctgactgaatgcccctgacccttttctgcgtcttggcaaacgtgcaggctccagcgtttttgaaaaggcggagcgtgatacggcgctcctatccactcaagggaggcatgttctgtccgctcgacgaccagcacgtgatcaaggcgggacgacagagcagttttcaaggaaagtgagccgatgttttctccttttagcggcaaagccagcttgttttgacccattcttctgcttttgccggcagcgagaaacacgccgatcagataggggcttctcatacaaccgctattcgttttcttgtttgaatgatttctgcaactacacttaccgcaatttcctctggaccttccgcaccgattttcagcccgaccggactgtaaaagtgagacggaggatgttttccgttcagcagccgtttcgtgcggtttgccgaacccaacagtccaatataatggaggttttgagaaaataagaagttgatgatcgtttgatcgtgctgataatgatgggttgccacaacagctgcatcatgcggaaaaaattgaaatttgctaagcattcgttccggaaaagcggtgatcagctgatccgcttttggaaaaagagaggatgtacaataagcgggccgccaatccgtcacgataacagaaaaccctgtgtcagccgccaaattggccagcggtacagtatccggtcccgccccaaacagaatgaggcgcggcttcggttcaattcgctgaataaacatgttagtgggtggatcgaaatgcggtaaatgaagcgttgaaacagtacgttgaatatcttgcagaggcgcgtccggccagttgccaaaatgcccgttctccgtcagaaataaataatgggaggattcaatctttataacagaagtgacagctttgcctgaatgaaggcaatccctcactttctcatagtgccgccttttttcctgagtgattcgctctgcatgaacatgaataatgccattgcacccggctcccatgccccaagaaagatcgtcctccgaccgcatgtcgtagggaatcagcgttgatgtgagctgatcgcccagcgcactgattctttggaatacatcttcttccacacacccgccgctcagcaagccaatccgtctgccttttttcttaaagagcatagaggcgcctgcttttcgatacgcggagccttcaacttgaacaattgtcgccagtacagcctcctcctggtcttccaggagcgcatctaacatcgtgtgaaaattccccaatgccgcatcctcctctcgaaaattgccgtgagaaacaactagttcagcgtgattttataggtaacttgtataaagaatagacgatggaagaaaaaatgactcatgatttgtcagaaaatgaaacacatagaaagaggatttgtaaaaagagtcaaacgaagaaaatcagattggagaaaacacgaaatcatatctaaaaagcttgcggagttccgcaagcttttctttacaccgctgcctggcggccagcgttttcatacacatccagcgctgcttggagcgcttttcctgcttcgattcctgcgttatgtctgagaagcacagcctctaacccggcaagcacgaatagcacgttttcttttctgcagctgtaccccatcgtgccgattctccagatcttccctgcgagcgggccgaatgagctggcgatttcaataccgaattgtgccagcagcatgccacggacagactcgccgtcaatgccgccgggaatttcgacacaggtgacaacaggcattttgcagctgtcatctccaaacaatcttagccccattgcctttatccctgctgctaatgcggcttcatggtgccgatgccgctcaaaacgcgcctcaaggccttcttcaagcaccagtctgactccctcacgtaaggcgtacagcatcgtcgtcgcttctgtatgatgattgagccgtctttcgctccaataatcctcaagctggctcaaatcaaagtagttgcttgtgattggccgatttcccgaaagcgcttccctgtcagcttgtgacgcaatcccccgctccacctttttacgagctgcaatcacgtccgccacccgctcattatatgtaatcggcgccattcctgagggcacagacaaacacttttgcgttccgccgatggcagcatcaatcttccattcatcgactttaacctcgcagcccccaatcgttgcgactgcatcgacgataaacaatgcatcctcggtgcggcaggcttcgccgatggctttcagcgggtgaatccgtcctgtcgatgtttctccatgcaccatggccacaattttcggcttcactttttttatctcccgtatgatgtcctccgggtcaaaaaccgttccccattcgcactcaagcatatgaacatttgccccatatcgctcggcgatttcagtcagcaaataaccgaaacggccgtaaatgggaatgagcacatcatcttccggctctatgacactagccagcactgcttcaattcccgcccgtgaagtgccgtcaatcgggtatgcccagcggttttttgtttggaacagctcccgaagcatctccatcgtttcattcataatacctgtaaacgccggatcaaattggccgacaaccggggtgctcattactcttaatacacgcggatcaacctcaacaggccccggcgtcataatcgttcttaacggggtgcataattctcttctgcctgacacagccattcctcctttatcagtaagccagtttgtataataaatcagtcagtgcgcggacgccgatctcaagctgtctggctgacgtatattccttcggtgagtggctgacgccgcctcggctcggcacaaacagcatacaagcaggatagcgccttccgatcatttgcgcgtcatgccctgctccgctcaccatttcctcacagctgaagtcgttttctaatgctgtttcaaaagccgcagccttcagcctttcgtccatcggcacaggctctatccgcatatattcatcaatcacagcgcgaattcctttttgtaggcaaatgccgttgatcaaagcaatcatgtcttgatgaaactgttccagcacatgctgatgctgatggcgaatatcgattgaaaactggacgcggcccggtatgacattggctacattgggctctgccgttatttttccgcatgtcagacggagctcatccggcagctcctccgaccgcagtaacagctcatgaatgatacggctgctggctgcgagcgggtccttgcgccatttcatggaggtggttcccgcatgattgcattcaccctccagcgtgacgagatagcgcctctgccccgcaatgcttttcacaatcccgagatcccgtcctgacatttccaatgtctgtccctgttcaatatggagctcaacaaaagcgctgatatctgtccgatatgctgcctgaaacacacctttgccaaaaccgttctcatgcatcgcatgttgcagcgagactcctgattcgtctcttggctctgctccatcctgtaatgaaaaaacacccgtcatattccctgatccccaataggtcattggaaaacggctgccctcctcctcacataaggataccgcttcgagtgtttttttcggcgctccatatgtctctttgagccgctttatcgcaagcattgctgccagaacaccataggcgccgtcgtattttcccccattgatgacagtatcgatatgtgaaccggttataatgacttcatccggagactgggtgcccgaaagccttccaaacaaattgccgacatcgtcgaatcttgtgtcaagcccgaaagaagacatttccgttttcacagcaagctgtgcgtccatccactcttttgtgtataaaagcctcgttacgccgccatccgcagacgcaccgtattgggcgagccattcaatataatctgtgatgctgttttttactgaaagcttctgcttttccatgtactcccccctctggccgctatggtgacttcattatagaaggaggaacatgatagttcattgacagattaaccaaaaaaacgtttattttttagtcacagtatctatccagcaaccagattcaccctacatgtcacaactattttgatgtaaaggtcaaaaggaaacacggtaaggaagagagccagcaagagcgaaagagagggtcaagctcagcttgccagagaggcgatgtttgcggaacggatgaaaacggaaatgccggcagctcgcaaaaacaggacctaaagatatgggaacaggagatttccgcctcctccaaagggactaatttacaattttaatgaaaaatatacaaaatgacacttctatcctttatttcaattttagataatagacatgatctgataaaaggagggcaagtgatgacaaaaaaatcatggtttctgccgctcgtctgtgtattactgatttccggatggcttgcgccggcagcttcagcaagcgcgcaaaccgaattaagcctcaatgaccgattggcgtcttcccctgcaggaacaggaagccttctctcattagccgcccccgctgcaccctatgctgacacagatacctattatgaaggggctgaaggtaaaacaggagactcgctaaaaagcaccctgcaccgtattattagcggacacacgatgctatcctacagcgaagtgtggaacgcgctgaaagaaacggatgaagatccgagaaatccgaataacgtcatcctgctctatacgaatgaatcgcggtccaaaaacctgaacggcggcaatgtcggcgattggaaccgcgagcatgtctgggcgaaatcccatggcgattttggtacgagcaagggacctggtactgatattcatcatttgcgcccggctgatgttcaagttaacagcgcaagaggaaatatggattttgacaatggcggcactgaatatgcgaaggcacccggaaattattatgacggcgattcatgggagccccgcgatgatgtgaaaggcgatgttgcccgcatgctgttttacatggctgtccgttacgagggtgatgacggctatcctgatcttgagcttaatgataagacaggcaacggctcagctccttatcatggcaaacaatctgtcctgctcgaatggaataagcaggatccggttgacgaccgcgagcggaaaagaaatgaaatcatttatgaaaaatatcagcacaaccgcaatccatttatcgaccaccctgaatgggcggatgagatttggccgtaagaaaaaggtgctccttttgaggagcacctttttctaatacacagcctcttccgtttccgcatcgaaaaagacgacgtggtccattttcactgagagctggattgaatcgcctgcatcgattcgcgtgtttccgtccaggcggaccttgagccgctcgtccccagccatgacatgtactatgagctccgagcccagattttcattcacttccacgttcgcttgaaacactgaatcaaacaactggtcatttcctgtcatttgtgtgatgtgctccggccgtacaccggcaatcatctgttctccggcatatcccttttccttcagccgctttgctttttcttcaggaatatgaagccggatcgaagaatttgtgaaaaacagctcgccatgctgctgttctatgatgcctttcaaaaagttcattccgggagagccaatgaagcctgcgacaaacaaattggccgggtaatgataaatgtcatgaggtttcgccacttgctgaatttccccttcattcatgacgacaatccgatctcccattgtcattgcttcggtctggtcatgcgtgacataaatgatcgttgcctctaatcgctggtgcagcttgctgatttctgtccgcatcgtcactcttagttttgcatccagattagaaagcggctcgtccattaaaaagaccttcggctccctcacaatcgacctgccaagcgccaccctttgccgctgcccgccggagagcgccttcggttttctcttcagcaaatgttcaatttctaaaattctggctgccgcatgaacccgctcggcaatttcctgtttcgccatctttctgagctttaatccaaacgccatattatcaaaaaccgtcatatgcggataaagcgcatagttttggaataccatcgcaatatcacgttctttcggcggaagatcattgacccgctccccatcaataagaagatttccttcagaaatgctttctaatccagccaccatccgcagcgttgttgattttccgcatcctgacggccccaccagcaccaaaagctccttatcctttacatctaaatcaaagtccttcacggttaattgtgagtgatatgattttttgacgtgttcaaatgttaatgaagccatcagaaaagtccccctatcttttgacccgttatttcgtcactggaaacaacttggtctttctgttatttttagagtaatcgattcccatttttgctatatttctaaaataaaaaatgtaaatttgtattataacgtcataatacattataatataaataataggttaaaaggaggctaccctttgttaaacaacggaagttctacacctttatacattcagctaaaacaaatcatcactgatgacatcaaaaagggcgtgtattccccaactgccaagctgcctaccgaaaacgagctttgcaccaagtataacgtcagccgcatcaccgtcaggaaagccattctcgatttagtcgaagaaggctatctgatcaggcagcagggaaagggaacgttcgttaaaagccctaaattaaaacgagagctgatcgctgtaaacggctactcggaatttatggaatcaaccggcaaaaaaccgaagcatcatgtgctgtcccatgacatcattccagcgtcaaaacccatcgccgaaaagcttcaaatccaacccgagagccctgtggttgaattaaaacggattttatataatgatgatcagcctctcacctttgaagtgacgcattatccgcttgatttgtttcccggcattgatacctttattgctgacggcgtatccatgcatgatattttgaaacagcaatacaaagttgtacccacgcacaatacgaagctattaaacgttgtatatgcccaacaggaggaaagcaaatacctggattgtgatatcggggatgcgctgtttgaaattgataaaacggcttttacatcaaacgaccagccaatctattgctcattgtttttgatgcacacaaaccgtgtcacttttaccatcaacagcccctacacataacaggcataaaaaacgagacactgcttatagtattctcgttttttcactgcttcccccgtcctccaagcgataaggatagccatagccgaaagctccgtacacaccgcatgttttcgcagccgtttcggcggcctggcgcaaagcgtacgttatatcctgcttcacgcaaaaggcagtcaaaaagcctgctataaaagaatctcccgctccaagtgtatctattatatcagcttccacaatcggctgatgatagactcgatcacccgcagacaggattgctccttggccccctcgggtcatacaaaccattttggctccgtacccatgagctgttttggcaagctcaccgcattccgactcactcaaatcgcttcctgaaaaaaacgcatacgtcacataaggacagaccctcctcaaataatcatcctcccgattggttgaaaaatcaaatgagacagggaccagcccgcacagctgcggaagatcgttctcaagcctgctgtacacgctcgtatgcagcagatcatgcccgctgataaaagatacatctttctcctgaaacgcgaggcgaagccgggactgaatgccgcctttatttgatctgacaaaaatgcggtccccctgttcatcaagggtgacaatcgccatcccgttttctccgtgcgcctggcggatataatctgcattgacctgctccagcttgagaacgttcaacagatgcgccgcggcttcgtcattgccgacgattccaatataggaagactcatgcccgagccgcttggcaagcacagcaacgtttaaggcatttcctcccgggtaaaatgtttcttgatcctggtagtaatctacaacattatctccaaccgcaatcaatttcatagcgcttcctcctttatccttttacactgccgcttgcaatcccgcggacaaaatatttctgcatcaataaaaatagaataataatcggcgcggctgaaatcgttaaccccgccagcaggacgccccagtctgtctgcagcgcgtctctgaactgcatcagcccggctggaatggtccgtaaattctcatcatctatgaaaataatcgcaaacataaactcattccatgtatggtaagccgtcaaaatgccggatgtcaccaaaatcggcacgctcattggtaagaaaattctgaaaaatactccaaaacttgtacacccatccaaataggccgcctcctccaattcttttgaaatagaaagaaaataagagcggatcaaaatgatggtgaatgggatccgataagccgcatacggcaggattaacgcccaatacgtattgtacaggccaagcgactgaataatagaataaagcggcacaagactgacctgcggcgtcagcatcaatccgccgagacatagcaccaagaagaatccttttcctttaaactcaaaccgggaaaggccatacgctgcccatgcactgataaagacagtgatcacacacgtcagcgccgtaacgatgacactgttcataaaataagaagaaatcccctggttccaggcggaaacaaaattttccggatgccacgatgacggcagcgaccagctgtgctcaaaaatatcgtcagagtttttaaaggcgctcatcaccatccagagaagcggataggcaatcgcaatcagataaagaaacagaaaaacccacacagacgtttctccgatataccattttcgtctaggcttatctttaacctcaatgtgctggtcaggcacaggctccaacctgaacgaatctgtcttcttctgaggcagcatcagttactcctcctttccggttttaaagaacttcatttgcatgagcgataatgcaagcgtaatgattaacacgacagtggcaatcgctgaggcgtagcccatcatatcctttgtaaaggcgcttttatataaaaacgtgctcaagacttctgacgcgtttcccggcccgccgcctgtcaaaatgtacggctcattaaagaccgtaaaggccccggtcagcgtcatgaccaccgcaacaaaagacatctctttcgtctggggaacagtaatatgaaaaaactgctgaattttacccgcgccgtcaagccgggccgcttcatacagttcatccggtattttttgaatcgacacaatgtacagcatcgcaatataaccgacagattgccactgggacacaaaaatgacagaaagcatagctgtgctgtcatccccgagccaggccctcgtcagctgatcaagaccgatggcctgaagcagctgattcaaaagccctgtctccggattgtaaataaaatcaaacaaaagcgcgatcacagtcattgagatgacaaccggcaaaaagaaaacggtacgaaaaaacggcgaccattttctgaccagcttatcctcaagcaccgccgccaaaatcaaaccgccaaatacctggcatacaattgagatcactgcataaagcacattattggtaagtgcctgatagaagacaggatcatgaaataattcaacatagttttttaagccgataaacgttttttccggagaaaatgagctccactgaaacaggctgaggaatacattctcaaaaatcgggatataaacgaaaagtaaaaaaacgagagcgggcaccaaaaacaaataggggattattttattctgattgaccaagggtatctcatctcctttataaaaagaaaaggtgcgaagcttcaccttttctttgatttattcagctgacgccctcacctgctttgctgccttttgaacggctttcatcacctgctgcggtgtcatgtcgccgccaagcatttgctggacgccagttaggtacgcatctgcgacttcaacatcgacatccatatcaaaccatggaaccattgatttggcatcaacaatatgctgaacggcttcacgctgaatggctgttgcattttcttcagtagccgtaccttgcactgcactgtatttcccgacatctttcacgagcttttcgcccattcttttcgacgtcaagaactgcaaaaattccatcgcttccttcggatgttttgttcttgaggaaatcatgaatccttccggcgctcccgttaacgcttctgaagatcctttctgcccgctaatttcaggaaatgggaacatcccgagattaaccggttcaaccagcttgatttccgctgtttccgcatatatcatcgccgactttccgctcttaaattgctgtctcacatattcgtggtcgacggagtttacatgtttattaaagtaaggcatcagctcttgaagcttttcaagtgcttttacgtagccttcatcagtaaattcacccgttttggcgttatagtccttttcccgtgttttttcatcgaccatccgctgattaagcgtgccgatatagtgcgagattgtccaagtcgcctttgttccgaagctgatcggtgtgtagccatgttctttcagcttttttgacacatcgattaattcatcccacgtcttcggggatcaagattcagcttttggaaaatgtctttattatagaagaatgatttagcgtccatttgccacggcacgccatattgcttgttttcataagtaaatggtgtaatttgcgattgaacgagctgtgatgaccaatcggtgtcatttttgtagtaggacgagagatcaagtgctttattgcctctgataaatttaaaagcaaactcatcgctccaagagaagtaaatgtcaggagggctggtggttcccagcatgaccttaattttatctttataggagtcatttaaaacggcttcaatttgtatatcgatatctgggtgttctttttcaaattccttaacaacctcttcaaaataacttttttccggctccttcggccatctgtggaaaaatttcaatgtcacctttccgtccgctgaactgctttggctcgaacagcctgcaatggtgaacatactgacagctgcaatgatcaagaacaacaacattttcttcaaagggttggcctcctctggacattagactataatgttatataacattatagtctaatgcataatggttcctcattttcagatcaatactcaactttccacatgtatcttctatgagataaaggatgatttctcgcctctgccagctcgtctgcatagcttctcagcacacgattgagaacgagcggagcaagatagcctttaactgaatcgtcaattgcagtgaagtcgtaagatgcagcatcaagcacagtgagctttttgccatactttttcgagaaggtaagcgctcgctcttcaagaggtcttgtttcatctaaaccgagcaggatgataaacggcacggattcatcaataatttcaaacggtccgtgaaaatattctccggcatgaatggcgtgggaatgaatccattgcatttccatgagaatgcagatgctgtaggagtaagcgacaccgtagtttgcaccgcttgccatggtataaataatactttctttttcatgggcttttgcaaattgcttggcgttgtcagcttcctgcttaagggctttttcatatacagcctgcaattgatctaagccttcaattgcttgttggaatttcgtattgttttctaatacttgcagggttccaaaaacgatttgatacaaaacgccatagtttgtattgatcgcaagcgcctcatcaccccaatcgtactgggcaacatattgcgcttcctgcgctaaaggagactccggtttaaacgtcatcgcaatcgtaagtgcgcccttgccccttgcaaacgcagcagctttgactgtctccggggtatttcccgaatgcgagcacaaaataacaagagacttttcaccaagctgaacagggttgcgctgaataaattcgttggcgctgtagaggtcggagtttattgattttgactctctgtcaaacacatacttactcggatacataatggcagaagaccctccgcatgcgacaaagaatacatgatcaatggttttccctttcaaatcctgcaagaaagcttgaacctcacgatttacttttgctgtggcctgactcaaatccttcactccccgtttttattatataacgttatataacattatatattgttatattaaagtccgcgggtaggattgtcaatattattttctgaaatttctcaataatttattcgaatgacagacaaagggtcaataagcgaaaaaatgcccaaatcaaaagccagaacttgacttaagctctggcttcgctgttcaatccgcagactgacgtcttatttaaaaaataccttgtctatattgtacttcgagtgctgtgtattgatgatatatgtttcataaatctctctttccattggatcatcaactacacatacctcaattttataaacttcatctctgtgatgtttgatcggtgaaacagtgtcttcgaaatgcttcttaattctctgtcttaactttctggctttaccgacaaacagcagctcgtcatgaatgttgtaaaacataaaaatgccgcctttgtcccttgggatctggtgaaagtcgatgaatccgtgaatcggttttatcttcggctcgttatcattagctgactgctgtcgttcagtgatggtgacattcggtgcgggtatatcaatttttatcaaaatcagttcacgtcctctttttcattaaagataaatgctaacacatacagaaaagaaaagctagaacagctttattatatttgtttgttatgctcttgcttattatgcaagtgctccggctggatgataaggactaaggtctaattctgtctgctttccgagaactagctttgcgagctctgcacccaagaacggtcccatcgtcagtccagaagcacccaaaccgtttgcagcatataggccttgaacattcggcacggcccctacgaccggcagaaaacccggtgtaaacggcctgaagcccactcttgtttcaactgcagcggcatcagcaagacccggtgcaacggctaacgctttgctcaatacttcgtgcaggcctccggctgtcacacgaagatcatcaaggcctgcatcgttttcgtgtgtggcgccggctacaattctgccgttatcaaacgaaagaatgtactgatcactcggcggcattacaaccggccacgatcctgtatctgtatctgtcatttcaaaatgcataatctgcgctttttgaaatgacacttgaaaatgaatgccaagagacttcaatatctcattggcccatgctcccgccgtcacaatgaccgcgtcagccgcaaactgctttgcatctgtttgcacgccgttgactgttccgttttcaaaaagcaaagacgcatttcctttgatgaccgttgcgccgcgtttctctgcagcgcttaaaagcgaccggcacagcgctcttccgttcacacgggcggcaccgctgatatgaaccgattcatagccgtcagctaaaatcggaaacagctttttcgtttcacttgcagacaagcgggtaatgtcgccgatttccggcgcatcctcccgtctcttatacgccctttcctccattttatcgagtttagacgcgtccgtatgaatgctgatggcaccgacacgtttgtatcctgtatccgtttcaccgtctttttccaattgatggattaaatccttatagtaccgggctccccccttagcaagctggtaccaatcctgattacggcgttgcgagagccatggacagacgatccccgccgccgcatcagtcgcttgtcccggctctttccgatcaatgacagtaacgcgagcgcctgattttgcgagatgataagccgtcgacgcgcccagaatccctgcgccgacgatgatgtacgatttcatatgcaaacaccttttctattataatgtctattcattttaccaaatcgaatgctttccttcgaccttttgccctaatgtggaaaaaccgcgaagttcgtccaatctctttactctcctatcgaatatcctgtcactatcaatagagaaaggatgataccatgagcgaaaatcgtcatgaaaatgaagaaaacagacgcgatgcggcagtcgcaaaagtccaaaacagcggtaatgcaaaagtcgtggtcagcgtgaatacagatcaggatcaggatcaggcacaggcgcagtcacaagacggagaagactaatgaacgaaaacatcattcctctcaacagacatactcaagagatacccactactgaatctgttatcaaaaacagcggcaactcagaggtccatatcgacattcacattgatacaatgccaattgcttttgctatattatgctctgcattagccgcaaagcagatgacaaaagaggaattcgatatggcttatactcaattgcgagagatgaacagagaaaataacagcagatcatctgtaaagcaaattatcaatcaggagacagaagaagagtaaaaaaccgcggcccctcggccagcggtttttcttctgcatacaaaaaggacgcgactgaaaaccagtcgcgtcctttttataaaaaaataatcgattgaaccttccatttcgaacttgattatttttataaaatggtacggaatgatttataaaagggtcacccaaacccttgatttaaagccatttcttcagatggtttaaatgatgataatcttaacttggcaccgtgttggcatgagctgaagccgcatgatataagggtttacagtaataattcacggttgccgccgtgagtaagtttcatatcttttgaaagttattattgaagtaatgcacctgttagttgaactattccacggcttatttaaactgtactaatcttttgaaatagaaataccgttctcaataaaatgctttattcatatttaaatttttgaggctactaggcatacatccaaaccaagttttgaccctgagcgtaaactagttaaaagtctaattgcaataaggagtgaacctcgaataatggtatatcaaagacaaatgacaccctatgccctgaatccccgggatttacaaaattgtttgtatcgtttcacgtatttgtggcttagaaataatgataatttctggtatttcttaacggctatcggagaatcaagagtttatggatataggtttttcggtggaagatggaataattattccgttgatttaagagatattgtttccttctattgttctcctccgactccaactctatattaaaacactgagcctgatatttgcatatgaagaaaatatttgtgaattaaaaaaggtcaaagcaaaatgaattgaatcttgaaatatccaggattcaaaaaaacaaagatgtaatcattttctaaaattacaataggcactatcttacacattcgaaactatcacaagcttcaggggttgaatatagaggcttacacgctttcagacacggttggacactagaacactaaaacaataagtgaaaaatattcacacataactgaaaaaatcgaacaagatgagcttgcaaaatttgcttcttactcaacaagataacaaaaagcttggcataaaaattggcacaatagaaacttggcatatgtcgaaaataagaaaaacccttgataaacaagggtttttcgttagttatccaatagaaccttccatttcgaacttaatcaaacggttcatttcaactgcgtattccattggaagctcttttgtgaatggctcgatgaagcccattacgatcatttcagttgcttcttcttcagaaataccgcggctcatcaagtagaagagctgctcttcagatactttagacactttcgcttcgtgctccaatgaaatgttatcatttaagatttcattgtaaggaattgtgtctgaagttgatttgttatccataatgagcgtatcgcactcgatgttagagcgggcgccttccgctttgcgtccgaagtggacgattccgcggtacgttacttttccgccctgttttgaaatcgattttgatacgattgtagatgatgtgtttggtgcaaggtgaatcattttcgcacctgcatcctgatgctggcctttacccgcaagagcgatagaaagcgtcataccgcgcgcgccttcgccttttaggatacaagccggatatttcattgtcagcttagaaccgatgttgccgtcgatccattccattgttgcgttttcttcacagactgtacgctttgttacaaggttgtaaacgttgttcgcccagttttggatcgttgtataacggcagtagccgccttttttcacgatgatctcaacgaccgcactgtgaagtgagtttgttgtgtaaacaggcgcagtacagccttcaacataatgaacgcttgcttcttcgtcaacaatgatcagtgtacgttcgaactgacccatgttctcagagttgatacggaagtaagcttgtagcggtgtttcaaccttcacgcctttaggcacgtagatgaaagaaccgccggaccaaacagctgagttaagcgccgcaaacttgttatcagtcggcgggattacttttgcccagtgctcacggaaaatatcttcattctctttcagcgcgctgtcagtgtctttaaagacgatgccttgtgcttcaagatcttctttcatgttgtggtatacaacctcagattcgtactgagcagaaacacccgcaaggtatttttgttcagcttcaggaataccgagcttgtcgaatgtttgtttaatttcttcaggaacttcatcccaagaacgctctgaacgctcagacggttttacgtagtacgtaatttcgtcaaagttcagtgagtttaaatctccgccccattgaggcatcggcatattgtagaaatgctcaagtgatttcaagcggaagtcaagcatccattgaggctcttctttcatgcgagaaatttcttctacgatttcttttgtcaatccgcgctctgaacggaaaatggaaacgtccttgtcgtgaaaaccatacttgtattcaccaatatcaggcatttttttagccatccattttcactccaatccttttaattgccgccttcttctttcgcgactcctttttcaagtgctttccatgacagggttgcacatttgatacgggcagggaattttgaaacgccttgaagggcttcaatatccccgagatctatagaatcatcatactctttcccttgcatcatatccgagaaaatcttagacatggaaagggcagtttcaatatctttccctttaatcgcctgagtcatcatcgaagcggatgccattgaaatggaacagccttccccttcaaacttcgcatcttccacgatgtctccgtcaagcttcattgtcagtctgatgcggtcgccgcatgtcggattgttcatatccacgacaatgctgtcattcaaaacccctttatttcgcgggtttttgtaatgatccataatcacctgtctgtacaatgtatctaagtttgcattaaaagacatttgtaaaatactcctttgtcttttgaagagcttccacaagcttatcaatctcttcctctgtattatacagataaaagcttgctcttgcagtagcagttacatccagccatttcatcagcggctgcgcacaatggtggccggctctgactgcgattccctccgcatcaagcacagtcgccacatcgtgcggatgaacatcatcaaggttaaatgtgacaagcccggcacgctcttccggcccgtaaaccgttacgccgtcaagctggcggaagcgttcaagcgcataagctgcaagcttgtgctcatggcgggaaatctcatcaagaccgatttcttcgagaaaatcaatggcggcaccgaggccgattgctcctgcaataatcggagtacccgcttcgaatttccacggaagctctttccaagttgattcataaagcccgacaaagtcgatcatttcaccgccgaattcggcaggctccatgttttccagcagggctttctttccgtacagcacaccaacaccagtaggtccgcacattttatgggaagaaagcgcaaagaagtcgcaatcgagatcctgcacgtcaattttcatgtgaggcgtgctttgtgcaccgtccaccacaatgacagccccattgtcatgagcgattttcgccatttctttaatcgggttgaccgtgccgagaacattagatacatgagacaccgcaacaatttttgtgttgcttgtgaccgtttctctgacgtcttctaaagaaatcgttccgtcttcctgcagcggaatatattttaatgtggcgccagttgcttttacagcctgctgccacggaatgatattcgcatgatgctccatgtaggtgatgaccacttcatcaccaggtttcaggttggcgcgcgcatagcttaacgccaccatattcagtgatgtggtcgtgccttttgtgaaaataatctcagccattgacttcgcgttaataaactttcggactttttcacgcgctccttcataaccatctgtcgctctggttccaagtgtatggacgccccggtgaacattggaattgtattggttataatacttatccagtgtttcaatgacagcacgcggcttctgggaagtcgccgcgctgtcgagataaacgagatcatgtccgttcacttgctgatgaaggatcgggaactgttcacgaatatctgtgatattcattacttcactttcctttcgataacagaaactaattgtttcttaacgccttcaatcggaagttcatttactaccggtgcaaggaatccgtaaatgactaagcgttctgcttcttctttcggaattccgcggctcatcaggtagtaaagctgaatagggtccacacggccgacagatgccgcatgtcctgcagttacatcgtcttcgtcaattaaaagaatagggtttgcgtctccgcgtgctttttcgctgagcatcagcacgcgtgattcttgctccgcattcgctttagaagcgccatgttcgattttgccgattccgttaaagatagaagaagcggaatccttcatcacaccgtgcttcaagatatagccttcagaagctttaccgaagtggatgatttgtgttgtgaagttttctgtttgctctcctcttccgacaacaaccgttttcgtatcgccgtatgtgccgtcaccgtaaaggtttgttgtattttcggaaatcgtgtcgccgtcgttcatcaggccaagagcccactcgattttgctgtcgcgtccgcgcgcagcaccgcggcggttcacataagttgtcacaccgcttgacagattatccaccgcaccgtatgtcacgctggcattatcacctgtgatgacctcactgataatattgaagacagcgtctttcgggtttacagtgctgatgtagttttctacatatgttacagagctgtggtcttcagccacaatcagcacgtggttgaatagagctgtatcattgctttcgtggacataaacagcctgaaccggcgtctccacctgaacatttttcggaacataaaggaatgctcctccgttaacaagagccgcgtgaagtgcagttaacttatgttcgtcaaccttcacgccgtccttcataaagtatttctccaccaagtcgctgtgctcgcgtgcagcagtcagaatatcagtgaagatgacgcctttgtctttcaattcttgagaaagagaaagatgtgccggcgtctggtcacgctgtacgtataatgttttatcttcgttttcaatgtcgatcagcgcttttacttcatcagtcaaatcttctaatgaagaaagcggttcgttatccactgtatgcttcgcgaaattcgtgaagttccagtttgtgatttttgttttgtcaggtttcggcatcggcagatcctcagcttgttcaagagcctgtaagcgcaggttcttcagccaggcaggttcttggtgcttttcggaaaagcttttgagatactcctgatctacggatagttttgtacctagtgtcatattaatccccctaacgcttacgcttcttggccaacagtttcgtcttcaatgccaagttcttgtttgatccagtcataaccttctgcttcaagacgctgtgcaagctctgcaccgccggattttacaacgcggccttgcatcataacgtgaacaacatccggagtgatgtagtttaacaggcgctgatagtgagtgatcatcaggcagccgaagttttcgctgcgcattttgttgatcccttttgatacaactttcaaagcgtcaatatcaagacctgagtcaatttcatcaaggatggcgattttcggttcaatcatcattaattgaaggatttcgttgcgttttttctccccgcctgagaagccttcgttaagatagcgctgagccatttcagggtccatttcaaggaactccatgttttcgtccattttgcggatgaatttcatgagagaaatttcatcgccttcttctctgcgcgcgttgattgctgagcgaaggaagtcggcatttgtcacaccgctgatttcacttgggtactgcatcgcaaggaataagcctgcctgcgcacgctcgtccacttccatctccagtacatctttgccgtcaagcgtgatgctgccttttgttacttcatatttaggatgccccataatagcagctgataaagtggatttaccagttccgttcgggcccattactgcgtggaattctccaccttttatttcaaggtttacaccctttaagatctctttcccttcgatttcaacgtgaagatctttgatcgttaatgttgaagcagccatatctatacctccaaaaatatataatcattattctcattttattctcattctaattttataacaaatgaaaagtaaatacaactttttatcgtgccttgcacattcctcaagtttaacaaagatcagcactttattaaagcgattgaaaaagaaaaagagtggattcccacccttttttaaaagattgattttctcaataagctcccgcagaaatccgcttgcttttttcgtaatcaagctctctctgccgctctactttcattcttgtttccagccggcgtccatattcctcgtatccaattccgtgtgacagctgcatcgctttttccatttctgacgtataatcgaggttcagtctgtcctggctactgcaaataatgaatcaatcccttcatatatttgctttttattgtaccagtgctgcgttggatgccgcaaaaacgatttggcgtgaaatagcggcagatgagacgaaagcatcctttcagaacaaatgagaatggtttttcggaatattccttctcttaatgcgtggtgtttccgaattcctcaatgcactgttgaacgactgtcacgccttggctgaaagctgcgccgcctccaaatgccgctgccacactgacggcttcgagaatgttttcttctgtcgctccctgatcgagacagccttttgtatgatagatcatgcaatattcgtcctgagcattgatggcaattccgagggcgatcagctgtttttctctttcagtcagagaattcccggcaaagcactgttcagtaaattcgttaaattttcttcccatcagcggcatcttttgttcaaatgtgcctaaaccatgtttatattgttttaacgcgtcctgcatgcttcctctgtcttgattcaaagaaaatccctccatctgtttaacattcctttttattatgaacagcttttaggaaaatacgcgaaaaaaccccggaattctcatccggggtttcagtcttattcagatacaggaagcacagctccgtcgtattttttctcgatgaagtctttgatctttttagagtgaagaacttccatcagcgctttgatttttgcagaatcttcttcgccttttcttactgcgatgatgttagcgtatgggttgtttttcgttgattctacttcaattgcgtcttttttaggatttaatttattttggatcgcatagtttacattgatgaagaccgcgtctccttctttgttttcatatgcttttgccgttaattcaggcgctactttttcgaattcaagatttttcgggtttttcttaatgtctttcaatgttgcgtcaactgtttccactttagaatcaagagtgattaatccagcgttttcaagcattgcaagcatacgtccttgttcagcaacgttgtttgtcagaatgattgtcgcaccgtctggaaggtctttcagtgatttgtatgttttagagtaaataccgaatggctctaagtgaacagcgccggcattcacaagtttgtaatctgtgttttctttcatttcttgctcaaggtaaggaatgtgctggaagtagttcgcgtccacttctttatcagctaaagctttattgtacattttgtaatcactaagcactttcactttcagcgtatagcctttttctttcagcaatggttcagcttcttttaaaatttctgcatgcggtgttttcgttgccgcaacgacaatttctttcttgccggattcagcgccgttattcgaaccgcaggcagccataactcctgcaaatacaagcagtaatgcacccaaaaatagctttttcaatgtaaatcctcccttatcgtttgtctataatatttgttattagatcaccgatgatttgaataataaacacgatgattaaaataaacacagtagcaacgaaggtaacatcagcgttattagactgatatccttctacgtacgcaaggtttccaaggcctcctgaaccaatggctccggcaattgccgttgagccgatcaaagcgatggctgtaaccgtaatgccagaaataagagcaggcattgattccggaatcagcactttgaaaataatcgtagacgttttcgcgcccattgatttagctgcttcaatcacacctttatccacctcacgcaacgcgatttcaacaaggcgcgcgtaaaatggtgccgagccgattaccagcgccggcaatgcggcgtttggccctaagatcgtgccgactaaaaatttcgtaaaacctaatagtaaaataattaaaataaggaacggaatcgatctgaatatgttaacaacggccgcaatcactgagttgaccgctttattctgccagaggcttcctttgctcgtcagaaagagcagcaagccgaggatgaccccgatgacaaaagcaaacagtaaagaaatcagcgtcatataaagtgtttcatatgtcgcgttccataattcagttaaatcaacgttcgggaagtatttttcaaacattcgtgatcacctctgctttcacctgtttgtcattaatgaaacggatcacgttttgcacttcttcctcgtccccgtcaatgtggatgaacagtgaaccgtaagccccatccttcgtctgcgaaattttcccttgcagaatattgacgctgacattgaagtttctgatcatctctgtaatcagaggctgttcagctgactcaccgacaaatgtgagctgaaccatttttcctgatgctgtatcatcaagaaggtgctgaagcgtctctttcgtttcttccggctctgtcacctgctgaacaaatcgttttgtcatttgttcctttggatttttaaagacatcgagaacctcgccttcttcgaccaccttgccgttttccatgacggcgactctgttgcagattttgcggatgacatgcatttcgtgcgtaatcagcacaatcgtcaaaccgagtctttcattaatatcggacaatagatccagaattgaatctgtcgtttgcggatctaatgctgatgtcgcttcgtcacaaaggagaaccttcggattgtttgcaagcgctctggcaattccgacacgctgcttctgaccgccgctcagctgggacggatatgatttttcttttccttctaaacctaccagtttaatcagttcattggcgcgcttgatccgctcgctctttttcaccccggcaatttctaaaggaaacatgatattatctctgacagtccgcgaccaaagcaaattgaaatgctggaaaatcatactgatctcatggcgtgcttttcttaaaccgcgtccatttacttcattaattttggttcccgccacttccacggttcctgaggttggtttctcaaggccgttcagcagacggattaaggaactcttaccagctccgctatatcctataattccaaaaatctcaccttttttaatggaaagcgagacattttggacagcattgacatctccatgtttcgacttgtaaacttttgaaacatcctgaagattgatcaaagcaatcacctgccttaacactattctaagaaatcttccggttttttctgcaaaagaaaagcctttctgcacacttgagcagaaaggcttatataaaatgcctttctctcatctttcaaagctgaacgcttcgtgtgaattggcaccatttcaacagtgttgatggttgccgggcttcatagggcacttccctccacctctcttgataagagaaatatatagtctttttcgtccggaaattcttaatgtagaatagcacggcgaatgattaaatgtcaataaaataaatgatgtcaacttttactattataataatttattattttttaattttttaaaatcctctgaaaaaatccatttgtcagccagagaatggcttccagctttaacagggccctgaatgacccctttactttgaggcttccgctctgaatcaggtgctgaagggaaatgtctccgtgcaataaatcaataatttccgtttggtttccgtaaaaggtcaggttggacgtttggggcggagaaacttttttcatttctccctgttcgtttattgagacggttaaggcttctgcttctccttggaaggtaatgagcaatgttgaggcattcaaaaggggttttaaaaacagatgctgatactcatcctctaaaacttccgctttctccatatgtacaacctcctatttgttggtcatacatacacatttctctctttgtcgcaagaacccctttataaaacgaacgacaatttcataggatatgctgagaaatatgtcataaatgggatgcggaagatgatttttgtttgatcagctcatataaataagaaacggaatgaaatgcatatcctctttcgaccatctttccgcctttaaacagcagaaaacaagggacgctttcaatttgatacgcttttgcgaatgtcggagagtaattgacattgttttgatagaaggcgacatccggcagcatttctttcaccactgtcagcattttgcttgcaagctggcaggtgccgcaaaacggagtatataaatatagaaggtacacatcatcttcaatgtgatcaagttcgtgttcttggagttctttcatgctatacacctcgggactttctttcaagaaaaatagtatggacattcagattcgcacgcagtaatacagaagcgacatggtgcctgggagcagccgctacttccttataggctctgtcgatatggagatggcaggcttcattaaattcacgcttcagctgttttctcaatttctcacctgattcatcagcatcaactaatatatagacgtctttatcataaagctcgtcagccaattcctcgagcctcagctggctgattgttccgtttgtgcagataatgcgcaccggttcattcaggacgctttcgattttctctttatctgatttcccctcgacaatcataaccttttccagctcatccatcttcatcttgttcacctgccgcgtcaaatttgaaacgttcagattgtaaaagaaggcagtgaaattcaccgccaacattaacaccagccgttttcgtagtcacaatctacatattttgcgtcgtctccagagaccacatcggctgtcttataaaatttctcattttcaaaggaataaccggacttaagctcatattcattcatgcttgtcatttggccgatcatctcattatcatgatataacgagagccggccattttgaaagcggcctgtcacgtcattggtgacatcgagcttttgtttgtcgaaagccatattggacacctcccataacgttagcgtgtccaattgcttttacggctatcctgttttagtcttcttgtgtcatctcttcgtattgctctgctgtcatcagtttttcaatttcagaagcgtcagatggctcaacgacgatcatccatgctttttcgtacggagattcgttgacgaattccggactgtcatcaagatcttcgtttacttccacaaccgttccgttaatcggtgcataaagctcagataccgttttaacggattcaacactgccgaatggctcgtccgctttgatttcagcgcccacttcaggaagttcgacaaacacgatgtcgcctagttcggactgggcaaaatgcgtaattccgattctggctttttctccttcaacttttacccactcgtgttctcctgagtaacgcaaatcttttggtatgctcaattgaatccctccattttttacagcactacaataagaagataccacacttttcaaaaaaaatttacattaagcccagttttcttcaaattggtcttctttaaatccgacagtcactttttcaccgtctgttgtaagcgggcgtttgatcagcataccatctgaagccagcagctcgagctgttcgtcctctgacatgtgatacagcttttccttgagattgagctcgcggtatttcatgccgctcgtgttgaaaaatttcttgagatccagcccgcttttttcataaagcgcttttaattcttctttgcttggcggctgctcagcaatatgtatttcgtttatttctttcccatgctcttcaagccacttctttgctttgcggcacgttccgcatttagggtaccagtaaaaagttaacgacatcttcttccccctcaataaaataatcgaggttattttaacacagtttgttttaaaaacctaaaacagtgcttcttaaaaaagagctccgcgcatgcggagctcatggccaatcagacagtatatttctcagcctcaaaaatgcctgccgccgcctcgcgttttttctgaatcacgtttttaggcgttacgcgtgtcagcttgcgcagagcggaaagcatcatgcggagtgaatctccttcttccattgcgataagggattccttcgcatgcgcttcaatttcgttaaaggcctcttgaacgaaaatttctgtgtacagcaccttttgcgctgctttttcagcgccttgtgcggcaatggccttttccgttctgagcacggctgattccattgcgtatacattgctgacgatatccgctacgttcacgagaatttcttgctcacgatcgatcgcttttccgtatttttgcgcggctaggccggcagcaaacaacgcaatttttttggcttgcttgacgatatatttctcctgctctaagacgccgcttccaggctcttcaggcataagcatcatgagttcttcctgcagcgactgcgctttttcgaataaaggcagctcgcctttaagcgcttttttcaggaaggtgcttggcacgattaaccggttgatttcgtttgtgccttcaaaaatccgattgatccttgaatccctataggccctttctacttcgtattcctgcataaagccgtagcctccatgaatctgcacgccttcatcaacgatataatcaagcgtttcagagccgaataccttattcagagagcattcgatggcgtattccgcaatcgatttggcgatttgccggccgtccttgagatcttcggccgtgaactggctcatattgtcttcaaacagcccgacggttctgtatacagagctttccatcgcatacagccttgaggccattgtcccgattttttcctgtgtcaatgaaaaaccagcaatcggcgttttaaattggcggcgctgatttgcatatgccgcagacagctcgatgacgcgtttagatgcgccgattgtgccaaccgccagtttgtaacggccgatgtttaaaatattaaaggcgatgacatgccctttgccgatttctccgagcaggttttcctttggcacttcagcttgatccagaatgagggttcttgtcgatgatcccttgattcccattttcttttcttccggtcccgtggagacacccgggaactctttttctacaataaaggctgaaaacttgtcgccgtctatcttggcgtaaaccacaaatacatcggcaaaagcagagttggtaatccactgtttttcccctgttaatacataatgggttcctgcttcattcagcacagctgttgtttttgctccaagtgcatcagatccagagccaggctcagtcagagcataagcggcgatcttttcgcctgaagcgagtccaggcaaatattttttcttttgttcttctgatccgaaaaagacgatcggcaaggaaccgataccgacatgcgcgccataagaaagagaaaagcttcccgcacgcgaaaatttctcagtgatgagtgccgagctgattttatctaggccgagcccgccgtattcttccggcacatcggcaccaagcagccctagttcgcccgctttcttcaacagtctgacagaatgctcgaattgatggttttcgatatcatctatatgagggagaacatcttgctcgatgtaatcctctgttgttttcgcaatcattttatgctcgtcagtgaaatcctccggtgtatacatttgatcgtatgtgacatcctcgattaaaaatccgccgcctttttgtacgtcagccgctttttttgccatttgtttttccccctttagcataattcaaatacaccggccgctcccattccgccgccgatacacatggtcacgactccaaattgctcgtttctccgtttcatttcatggatgagtgagagtgtaagctttgtgcccgtacagccaagcgggtgtccaagcgcgattgcgcccccgttgacattcactttttcttcatcaattcccaattccctgattacttgaatggcctgtgaggcaaaagcttcattcagttcaaacaagccgatgtcctgcagctgaagtccggcaagcttcaaagcgcgcggaatcgcttccaccggtccgattcccatgacttccggcggcacgccgcctactgcaaaggaacggaatttcacaagcggcgccaggccaagagcatcggctttttcccggtccatcagcatgacagccgccgctccgtcacttgtctgcgaggaattgcccgcagtcaccgtcccatcaacggaaaaggccgggcgcaatgtcgataagatgtctgcagtcgtttgcgggcgaacaccttcatcctgagaaaacacaaactgtttttccataggcttatggtcttctccgatttctgtcaccgtcacttctacgggtacaatttcatctttaaattttccttctgcaagggctttagcagcgttttggtggctgcgaacggcaaacgcgtcttgatcctcacgggagacgccgtattttttcgcgacttgctcggctgtgtggcccatgctcatataatattccggtgccttttctgccaaagcaaggttcggacgggtaacatgccccatcatcggaacttgcgacatggattctgctccgccggcgatcgctgtatcgtaggcgcccagcataattttttctgctgcatatgcaatagactgaaggcctgaagagcaataacggttaactgtaatcgccggaaccgtgtacggcaggcccgcgagcgcaccgatatttctcgccatattaagcccctgctccgcttcaggcgttgcacagccaataatcaaatcgtcaatattgccttcgtaaccgcctgcccgtttcagtgtctcttttacacaaatcgctcccaaatcatccgggcgaacggtggccaacgatcctttttttgcttttccaaccggtgttcttgcacctgacacaatgactgcctctttcataagctccctcctaattccgtaaaggtttacctttcacaagcatatgctgcattctcgcttgagattttgcctctcctgacaaactcaaaaacgcttctctttcgatctccaataaatactcttcatcaacctctgtaccaaacggcacttttccgcccgcaatgacataagcgagttttttcgcgatcttaaaatcatgctcagatatatagccggacagcttcatctgctcagcgccaagcaagagtgccgcataaccggtttctcccggcaccttgaccttttcttttacaggcggccgccagccggtatcgtataaagatgcggccagctgcttcgcatcgtataacaggtggtcttgattcacgctgatctgatccgtttcttttaagatgttcatctcacgagcctcttgagcggaagcggacactttcgccatcgcgattgtttcaaatgttttcattgccgcattcatcggatcatggccgcggcgaagatggttgatgtacagctctttgttacctcctccgccagggatgaggccgacaccggattccacaagtcccatataggcttcgcttgccgcttgaatgcgcgccgccggcaggcatgcttccgttcctccgccgagcgtcatgccaaatggcgcggcgacgaccggtttcgcactgtatttgatcttcatcatcgtctcctgaaaacggcggatcacaaaatcaacttccaaaaagttgtcatcttggacttccattaagatcatggcgagattcgcgccgacgcagaaatttttcccttggttgccgatgacaagccccttgtaattccgttctgtttcctctaatcctttgtggatcatttgaatgatatcgaggccgatcgcattgcttttcgaatgaaattcaagaagggccacatcatctccaaggtcaattaagcttgctccgctgtttttcgcaatcacgccttttgtttctttaagtgcttgtaaatgaattcgttttttattttctttcacggctctgtattcgccgcggtcataataaaataccgttccgttctctttgatgtagaaggtttcatttcctttgtccagcatctcttttatccagccaggcatatctgctccaagctgctcaagcttttccgctgactgcttgaggccgatggcgtcccacatctcaaaaggtcccagttcccagccgaatccccacttcatggcttggtcaatcgcatgaatatcatcggcaatctcgccaagcagctcggctgagtaaagcagggtttgagaagtgatattccacagcaaacggccggccctgtcatccgaataaataagcgctttcattttggcttttgtcccttttgcctgttttgccgcttcaagtgccggtgatttcatttttgtccgctcgccgtaagtaagcgtcactgggtcaagctcataaatcgtttttccttcttttttataaaagccttggccggccttgcttccgatccaccctttttccagcatatcgttcatgaagcttggaaggcgaaacacttctttttcatcgccatcagctttgtcatacacatttcgggcaacgtgggcgaatgtatcgaggccgaccacatcaagcgttctaaaggtggcgcttttcggcctgccgatcagcggtcctgtgatcgaatcaacctccccgacctgataaccgcctttcagcatttcttggactgtcacgagaagcccgtaagtcccgatgcggtttgcgataaagttcggtgtgtcctttgctgtaacaacgcctttcccgaggacattttctccgaaagctgtcataaactttaaaatatcaggatccgtttccttaatcggaatgatctctagcagctttaaatagcgtgcgggattaaaaaaatgcgttccgagaaaatgggctttaaaatcatccgaccggccttcagccatttcctgcactgatatgccggatgtgttgcttgagacgatgcttccagtctttcgatgttcatccacaagagcgaaaattttctttttgacttcaaggttttcgacaacgacctcaataatccaatctgcttctttcagtttttctgcatcatcctccagattgcccggtgtaatataggaggtatttttcgctgatgtgaggggagcgggcttttgtttcagcagttttttcaccgcctgccggctcagcctgctgcgcatctccggactgtccttcgtcagcccccttttttcctcttcctttgtcaaatcgttcggcacaatatctagcagcaggacaggaattccgatgttagccaaatgcgccgctatcccggaacccattacccccgatcctaaaacggctgccttccgaatgtgtttgtgcatgagatatcccccttgaacattgaatgaatagtcattcattttttgaccaaaaaaaatgaaacccgtttcttctttcatcttaaaagatttccggttcgacttcaatagctaatttgttatttttttgtatgaagcctataaaagtcgggcaacttaagcccggaggtgaagggaatggtacgagagaaaaaaaatccgtcttcagcggcagtcagcgcggcgagcgtaaagggagatgccggtccgactcagcattacggcggcggaaaactgacaagtcaaaatcagcagtataaaaaacataacatggaacaatcataatgcagctgcttcccgcggctgctttcactttttcaaaattccttttaacacaaacgctgcattggcaggccgctcggcaattcttctcataaagtagctgaaccagtccgttccatatgggacatacacacgcattctgtagccttccttggcgagttccttctgacgctccggcctgatgccgtatagcatttgaaactcaaattgcgacgcggggatttgatgttcggtgacaagctgtttcgtaaatgcaatgatgtcatcgtcatgtgtggcgacagccgtgtagttcccgcttaacaactgcagctttattaagctctgaaaatgaaggtccgttcctcttttgtcgggaaacgctacagccgcagattctttataagcgccttttacaagtctgagattcggctttaagtcccgcatctttctgatatcttctgccgcccggtacagatacgcctgaatgaccgtgccgagcttctcaaattcctgtttgcattgcctgtaaatagaaagtgtctgttcataatgagtatagtcttccatatcaatggtcacagcaacatcatattgcttcgcaacggaaagaatggcgcgcaaatgagtaagagcaagttcttctgaaagatcgagcccgattgaggtcagcttaagtgaaagctctgaattcaattgatgttcggcaatggcttgaatggctttcttgcattcctctgcgacttggtttgcttctttttccgaagctgcatactcgcctaaataatcaattgttgcacacaaaccggatctgtttagccttttgacggtcttaaccgccgattcaatcgtatcccctgcgacaaaccttcgtgctccaagccgcgttccgtatgcttttgcgaacttggtaagtgttttattttgagataagaataaaaacacatgtctcagcatccgactccctcccgccgtcatcttcaaaacacctgtatataactcccagtctgaaggaaactataaaatgaacagaaaccaaaggaggatcacaatggataatcagcagcaatctcaaatgccgccttccgttatttcgacaaaggatcatttgtatctcaatgacatgctgaactggaatttgctcgcgatgaagaaagcgcatttcatggcgcagcagtgccaggatcaaacgttaaagcaagaactcgaccgcgtcggacacatgcatcatgatcactatcaaagaatattaaagcacctgcagccaggccagcagcagtccggctacatccaataaggaggcgccagaatgaatcagcaaaatcaaaaaatcagcaacccgcagacacctgtaccgacaacatcggaaatgaatgacagagatttcgtcaacgaattgctgacaaccgaaaaatacatgacaacagcttattgcactgctttgcacgaattcagccacgagtctctttatcaggatattcaatccatttttgatgagtcacaaaaagcgcaaagaaaactatatgatctcatgtttcaatatggatggtattctgttgaagcggaggatgcacaaaagctgcagcagtcctatcaaaaattccagcagaccattcagcagcagtctccttatcagcaataacaacattagtaaaaaggatacgatgttctttagggcatctatcctttttttgtgtaaaatcagttgacttttcatttacgcttatttatatttaataagcattaactattttgtcattaaaatatatatacagtgtatgtaacagaggggaaatgaatatgaagagtgcggatcagttaatgtccgatattcaattatcgcttcaggcgctctttcaaaagatacagcctgaaatgctggaaagcatggagaaacaaggtgtcaccccagcacagctgtttgtgctggccagcctaaagaaacacggcagcctcaaaatttctgaaattgccgagcgtatggaggtgaagccaagcgcggtgacgctgatggcagatcgccttgaacaaaaaaatcttatcgccagaacacacaacacaaaagacaggcgagtgattgatctcagtcttactgacgaaggagacagaaagttcgaggaggttttggcaggcagaaaggccattatggcgcgctatctttcctttttgacgaaggaggagatgcggcaggcggcgcatattacagcaaagctcgcacaagcagcagaaacggatgaaaagcaaaacatgaaaagaggaaacggatgaaaatgagtaaagaaggcaaacaatcaaaacgaacgttattaataacaggcttaattattgccatgtttttttcagcccttgacggtaccattgtcggaacggccatgccgaaaattgtcggtgatctgggcggtttgagcatgatgacctggctgacaactgcatatttgttaacatcaacaaccattgttccaattgccggtaaactggctgatttattgggacgccgcattgtctatgtatcaggtttaattattttcatggctgcttctgctttgtgcggaatggccaacaacatgacagaattgattatcttccgtggactgcagggaatcggcggaggcatcatgatgccgatggcgatgattgttatcggtgacttgttcacaggaaaacagcgtgctaaattccaaggtgtctttggcgcgatttacgggctggcttcagtgattgggccgcaaatcggcggctggattgtagactcgttaaactggaaatgggttttctatattaacctgccagtcggaattattgcggttatttttattgccagaggattacagggacgccagcagactggtccgatcaacttcgatatcgctggtattttcacaatgattgtcggtgtggtcagcctcctgctcgccttaagctttggtggaaaagattatgcatgggattcatggcagattcttgggttgttcgctctcgcactgatcggcattgtcagctttatcatcgtagaatcaaaagcaaaagagccaatcctgccaatgtatttatttaaaaacagaacatttacatttctaaacttgatcggcttctttatgagtatcggtatgtttggcgccattacgtttgttcctttctttatgcagggaattgtcggtgtaagtgcgtctgaatcgggtacaattatgacaccgatgatgatttctatgattattacaagtatcatcggcggacagcttgtttataaaatcgggattaaaccgcaaatcattgcaggcatgctggttatggccggcggattcctgctgttaacgaccttggatctcgacacgagcaagcttgtcgctacatcttttatggcgattattggtctgggaatgggtcttgttatgccgattctgacattggctttacaggaaagcttttcgaaggaggagcttggagttgtcacttcatccagccaattcttccgttctatcggcggaacattcggcattaccatgctgggagccgtaatgaatgcgagatcaggaaatctattaacagataaattggttccatatttagactctcttccggcacaggcaagctcgtttgccgcccagctaaagggtatgattgatacaaatccgcaagggctgctgcaatcactgttcagtccggacgcggtcaaacaaatccctgcggctttctcatcccatattgtgccgattttaaaaacatcgttgatggattcgctccacagcgtgttttatacgggcctgatctttatcgcagtcggagccgtattcaccttgttcttaaaacctatcaagctatcaaataagaaagcggaagaccaacaagaaaaagagaaggcggcaaaagccgttgaatcaccttcccattaatagagcaccccgcgggtatcaatccgcggggttttttattcaatcatctgggctcttccatttccgaaagaccaatcctcagcctgatttccggccagcatgataaacacatcttcttttcttacaccaagctcggaatgaatccggctcgcgattgagcggtaaagtgcttttttctgttcagttgttcttgactgtttcagtgtaaaatgaatgtatatcagttcatcagtacgctcgacttggagataaaatggatcataaaaaaattcgcttttttcatattgtctgatgacttggaaatagtcatcttccggcacattgatttcttcaatcatcgattggtggatagtcctgctcagtttttgaagccacacttcgcttcttcccgaccgtaaatgaatctgtacaaatggcatctccccgcatccctttctttacagcgtctgtccgctgtcaattgtgataatttggcctgtgagtgattcctgttcaattagtgaacaaatcaatttggcaacatcatctggttcagcaatacactgcagcggcaaagagccgatcatgcttttcattttttcttcccgtccggcccaccatctcgttgccacagctcctggtgctacaccgctcactctgatttcaggcgctaaggcgtgggccaatgatttcgttaaaccgtgcaccgctgattttgatactgcgtaaggcatagatgagccgacaccagttatccctgcgatgctgccgacgtttacgatcgccccggccttgcttttcttcatgaacggtaccactgctctcgcgcaaaaaaacatccctttcacattgacggcatacagctcatcccagacgtcttctgtcgcagcctcaagatcatccattggaatatgccgtgtaatgcttgcattgttgactaaaatatcaaccgtgccgtgtgtgctcacgattgcttgaatcatatcctgcacgtcgctgtttttggatacatctgcttggatggcgaaggcttgcccgccagctttttgaatcttttccactgtttcctccgcttctgattgcgagcgtgaataattcaccgccacaatcgtcccgcgctttgccaattccatactggctgcttttccgattcctgtgccgccccccgttacgagagctattttgttcaagacattcattgccgccactccttgctgttgactaaagtatatttctgattccattgtaatccagctttgatgttacgtataatgattgttaaagatactagatatcactcagattgatagtaaacgaacggaggagttcaaaatggaaagcggagatttacgtgtgtttcaaatggtagctcgtgaagggagcattacgaaagcagccctgcagcttggctatgtacaatcgaatgtcacggccagaattcaacaattggaagctgagctgggtaccacactgtttttgcgccataatcggggcatgacactttctgcaagcggaaaattgctgctggactacgcaaataaaattataggccttcttgatgaagcgtctaaagcgctctcatcctccgcagaaccaagcgggccgcttatgatcggctccactcagacaaccgccgcggtaaggcttccaaagcttctggcatcttattatgaagaacatccaaacgtccagctgtctttaacaacaggacatacgcaatttctccttgataaagttcttcgttatgaattggatggcgcgtttatcggatgcgaatgccatcatcctgagctcgaatcctatcctgcgtttgaggaagaaccagtagttgtttcggctgcctccgtgcccgatgttgaggaagccatcacaaagccgattctcgtttacagcacaggctgttcgtatcgagaaacacttgaaaaatggctgcgctccgtcggtgtcacacagccggtcattatggaatttgggacgcttgaagcaattatcggcggggttacagcaggtcttggcatctcgttgctgccaagaacggttgtgcagaaacatgaagcagaaggatcaattcgattgtacccgctgcctgaagcgctcagccagatgaaaacagagtttattgttcgaaaagattcgtttatcagcagcgcgctgagaacctttatggattcctttacgccagataaaacggctgaatcacaaaaaagcagtctgctataatgtacagactgctttttggctattgtttgtttcgatgcgcttcatttaattccttaatatgctgaatgatctctttaatgccctgctttgcgtcggggtatgtcgcattccaatgcttagcgagcggtggcatgctcttggctatatgcgtgtacaaaatccattgcttcacttcttcttttagctcatcgtttgtctcaccaagcagaagctcagtatacttctccagcaatccatccagctgctcctgaagtttttgttccatttgccatcttcctttcgaaaaaacagcaaggagctttctcaattgaaagctccttcgctgcgttatttatccatgtgatgtgaaagccgcttcctggacaatgcatctgcccctgccatgaggaatgcaaagaggcgttccgaagagcgggtcctgtgtaacctgacagttcatagaaaacacattttgcacaagatcacaagtgatgacctcttccggacggccttctgcataaatccgtttatcttttatggccacaagatgatgcgcatagcggcacgccaagtttaagtcatggagaaccataacaatcgtccggccttccttttcattcagctcaaacagcaaatcaagaatttcaatttgatgcgtcatgtctaaatacgtcgtcggctcgtcaagaaggatgatatccgtttcctgggcaagcgtcatcgcaatccaagcccgctggcgctgtccgcctgacaaagaatcaacggcgcggtcagccatgtcctcaagctttgttgctttaagcgctctttcaactgcttcctcatcctcttttgaccactgcttcagccagttttggtaaggatatcttccttgcttcaccagctgatgcaccgtcagcccctcaggagccgaaggaccttggggcaggattgcgagctcttttgcgacttccttcgtcggaagcttggcaatcgctcttccttccagcagcactgaaccgcctctcggcttcatcaggcgcgctaatgaacgtaaaagtgtcgattttccgcagccattgctgccaataaatacggtaatttcacctttgggaattgttaaattcaactcatcaataataacggcatccccgtatcctaagctcagcgtttctgtagaaattgcactcatacccataaccgctcctttttgctggctttttagcagcactatgtattgcacgttttctatatacatgcttttaagtcaattatcatcaatgcaagtgattccgatattcagccatttgatatggtcatatatccctcattgtagcagaaaacactgactttgaaaatcattttcaattagttttatggacataattgacgtttatgggttttttatcacaagattacttcttgatttctctgatggagccgtccttcagcttcaattttaaatcgatatgatcataatgactgtccagattaaatgctgccagcacactgtgtatcacttctgtttcagccatttggtctgtcacggaaagctcgctcaaaatcattttcatctcatccaatgcttcttctccctcctgattgacaccggagagcttatcctgtatttccgctttttcctgagttccgttctttgtatagattccttcataacggttatgctcaccatccccgtagctcacacgaagcgaaaaattactgtagggaacggacttcagctgggtgacggctgtattttctccttctgcctgctgctggtcttcattgagacggcagcccgcaatcagaaccactgcgagacatacagccccggctgctctgaccaaatgcatatgtttcccccctgtaggattccatttattttaggtatatccagagaatgaaatcctcattcagagaagaattgaaaaagccggggcatttaacgccacggctttttctttaagattcggtcatttgtaaaaaggtttcggcgtcacgcacagccagcttgatggcattctcccagaaatcgcgctttgtgatgtcagcgcccaaatgcttcatcgccaaatcctccactgtcatagaagccgtatcgcgcaatagcgccatatacttctcttcgaatgtgtctttttcttcaagcgccaacgcgtaaataccaagagaaaacaggtagccgaatgtataagggaaattgtaaaacggcaccctcgtgatgtgaaaatgaagctttgatgcccaaaaaagcggatgatattcttctaacgcattgcagtatgcctctctttgcgcctcttccatcagctcattcaagcggctggccggtaccactccccgctttcgttcctcgtagaatctcgtttcaaatagaaatcttgcgtgaatgttcatgaagaacgcaacgcttctttgcactttatcctccagaagaacaagcttttcttccctcgtctcggcctgctggacagtcgcgtccgccactatcatctctgcaaacgttgaagctgtttctgcaacgttcatggcgtaggaacggtttaacggcctgacgttgagcattgcttcctgatggaacgcgtgcccgagttcatgcgcaagggtagagacatttgaggcgcttcccgaaaatgtcatgaaaatccgggattccccgctgtccggaaaactggtgcaaaagccgccgactctttttccgctcctgtcttccgcctcaatccagccgtcccgaaacgctttttcagtgaatgaggacagctttttgccaaacgttgaaaactggctggtaatgatatttgcggcttcatcatacgaatagacctttccgtcagaaccgatcggtgcctcgacatcgtaccagctgagtttttcaaggccgagcatggatgctttccggttcaaaaactgaacgaacggcttcttgttttcagtgatgacctgccacatcgtatcaagtgtttcttttttcatcctgttaatttgcagcggttccttcaggacattctcccagccgcgcgctttataggtttcaagccggaatcccgccaaatgattcagcgtgctgctgaaaatatcttgcttgctctcccaagcttggcggaaacgttcatatactgtttttctgacagtacggtcttgatgatccatcatattctccgcctgaccgacagacaattgcttgttttcaccgttttcctcatacgggatcgtcattttcccgacaaccatattgtataagtcactccaagcgtgatatccgtccaccgcaaggtttccgatcagtttttccttaccggggctaagcttttcggcaaccctctgtcttctttcatttaatatgtaagaaacatcgcgcaatcccggttttgttaacaattcattccacacgtcttgattaatgtccacaagtttatgatctaatgtaacgagcgacgattgaaaatctgcggaaagccgattcatgagtgcctgatgctctatagccttttgatcattgatattctgggcctggaggcaagcaacaaaagcgccggcctgctgaagcttgacggatgtctgttcgaataaatcaagcaacgcggtcagcccttcagcctcttcaggcgattcaggcacctgaaacgcatcagtcctgtcttgaaatgcacgcagactttgtgacagcttctcaatataacctttgaattcttccgattggctcccgcccttaaaaaatgaatcaagatcccatctttggcctaccccttgcagcgccatatcacaaaacccctttccttctttcgttctattatagaacaattctgaattattgtataaaaatttctattacaggcgtcatttcgtgttcaggatagtacaatagctgtagcagtttaataggagggttaggatgaataaaaaaatagccatcgtaacaggagcgtccagcggcttcggtctgctggcagctgtaaagcttgcccgatcatttttcgtgatagccacatcaagacagcctgaaaaagcggaacagcttcgagaattggctgcagcacacaatgtgtctgattctattcacattacagctctcgatgtcaccgatgaacaatctatagtctcattcggaaaagctgttagtgcttacgccccgatcgatttactcgttaacaacgccggaacggcttatggaggatttatcgaggatgtgccgatggaacatttcagacaacaatttgaaacgaatgtcttcggtgtgatccatgtgacaaaaaccgtgctgccttacataagaaagcatggcggcgcaaagattataaacgtgagcagcatcagcggactgacaggattcccagcgctgtcgccatatgtttcttccaagcatgcattggaaggtttttctgaaagcctgcgtatcgagctgcttccgttcggtatcgaaaccgctttgatcgagccgggctcatacaagacatcgatctggtcaacgtcattatcaaattttatgtcggtgcctgctgacgattcagcctatcatcaatactataaaaagatcctttcctatgttcaaaaaaacggagaagaaagcggagatccccaagaggttgccgacctcatttatcaattggcaacaaaacagcacataaagaatttgcgatacccgatcggaaagggcatcaagctcaccctgctgttccgatcgctttttccttggtctgcgtgggagtctatcctgaagaaaaagctattcagctgatctaaattataattattataatttagtattgatttttatttagtatatgatataattaagtcaacagatcacaaggaggacgttatcttatgaaaactgaaaacgcaaaaacaaatcaaacattagttgagaattcactgaacacacaattatcaaactggtttcttttatactctaagctccaccgtttccattggtatgtgaaagggcctcatttctttacattgcacgagaaatttgaagaactttatgaccatgcggctgaaacagtggataccatcgctgagcgcctgctggcgattggcggacagcctgttgccacagtgaaagaatacactgagcatgcatctatcacagacggcggaaacgaaacatcagcatcagaaatggtacaagcattggtaaacgactacaaacaaatcagcagcgaatctaaattcgtgatcggcctggctgaagaaaatcaagacaatgcgacagcggacttgtttgtcggattaattgaagaagttgaaaaacaagtgtggatgctttcctcttatttagggtaacaaaaaagctgaaccttaatcgggttcagctttttgttttttcttagcttgaactgctttctgtctgcttggtcagtgttgcgttcaacgttttcgtttttccctttcgcagcacttggattgttgttttatctccgacttttaagtctttgtaaaggatctgacggatatccgcactgctttccacgtctttaccgtttagtttgacaatgacatcctcagatttaatacctgctttttctgccggcgaatttgcttgaacttcttttacataaacacctttgcccaattgatctccaaacaggccgagcgtattttcctgataggtttcaggaacttgtgacatgtcaatcatctgcacgcctaaaaacggacggtccaccttcccgttttgcagcagctggtcaacaatcggctcgacatcattgcttgggatcgcaaatccaagtgattccacgccgctttcgctcaccttcaagctgttgatgccgatgacctggccgcttgcattgattaatgggcctccgctgttccccggattgatcgctgcatcagtttgcagcacgttcatttccaccgtcccttgtgttgtatccacatcaattgtccggttcaatccgctaatgatgccttgtgtcaccgtaccggaaaactgctgtccgagcgggttaccgatagcgattaccttttcgccagtgcgcagctgtgaagagtcaccaaagctcgccactttttttacattcttgccgctgatttccaaaactgccaaatcagtaatggtatcgctgccgacaagcttggcagtttccgtttctccgttgtatagcgtaacagtcagcttgttcgcgccttcaacgacatggttgtttgtaatgatatacgctttatcgctgtcttttttgaaaataacacctgacccggttccgctttcactttctgagctggagcctcctcccgtgccgaatgtgttattttgagaggtttggatatttgagattccgacaatcgtaggctctaaatcctctaccatatcagcgatgtttgatgcgttcgttatcggcgccgttgtaaaattatcagactgcacctgtttatttgcggaagcggattcggtcgcctgattttggtctgacggcagataaggcgcgatgccaagcatgaggcccccgccgataataccgcctaaaatcgggctcagccatgcggctctccgtttcttttcttttttcacagccgtttcttgcttttccatttctagtgcagaagccgtttcctgccgtcccgcttcatatgacacaggcgcgtcaagcaattcttgttcagaatgtccaatcagcttctggttttctgtattctgctgttctgtatgtgaaggttcagtttgatgttgatcgttttggccatcacgtcgataatccatgttcttacactcctttaacggttattcatttatcgttacatattcatcgcatgtacaagttcaattgtcccaataatgaggagaaaagcaaagcaccaaaatagaatatgtttgatcatcctacatcttcctcgctctttttctcttcctttcttcccttatacatatcataaacaaacattgtgggataaaaatgaaaagaatatgtgaaattatgaaaattgcctgccgtatgttaaaactagtttataatgacgttgaaaggatgtgaagagccttgtcatacaccatttatctagttgaagatgaggataacctgaatgaactgctgacgaagtatttagagaatgagggctggaacattacatcttttacgaaaggtgaagacgccagaaagaaaatgacaccgtctccccacctatggattctcgatatcatgctgccggataccgacggctatacattaataaaagaaatcaaggcgaaagatcctgacgtgccggtcatttttatttccgcccgagatgcggatattgacagagtgcttggcttagagcttggcagcaatgactacatttcaaagccgtttctgccgcgggagctgattatccgtgtgcaaaagctgctgcagctcgtatataaggaagctcctcctgtccaaaaaaatgaaattgccgtctcctcgtatcgggtcgctgaagacgcccgcgaggtctatgacgaaaacgggaatattatcaatttgacgtcaaaggaatttgatctgctgctattatttatccatcataaagggcatccatactctcgtgaggatatcctcctaaaagtgtggggacatgactacttcggaacagaccgggtcgttgatgatctcgtccggagactgcgcagaaagatgcctgaattgaaggtggagacgatttacggtttcggctacaggatgatgtcatcatgaaaaacaagccgctcgcgtttcagatatgggttgtcatatccggcatcctgttagcgatatcgattttactgcttgtgttattttcaaacacgctgcgagattttttcactaatgaaacgtatacgacgattgaaaatgagcagcatgtgctgacagagtaccgcctgccgggttcgattgaaaggcgctattacagcgaggaagcgacggcgccgacaactgtccgctccgtacagcacgtgctccttcctgaaaatgaagaggcttcttcagacaaggatttaagcattctgtcatcttcatttatccacaaggtgtacaagctggctgataagcaggaagctaagaagaaacgttacagcgccgacgtcaatggagagaaagtgttttttgtcattaaaaagggactttccgtcaatggacaatcagcgatgatgctctcttacgcgcttgattcttatcgggacgatttggcctataccttgttcaaacagcttctgtttattatagctgtcgtcattttattaagctggattccggctatttggcttgcaaagtatttatcaaggcctcttgtatcatttgaaaaacacgtcaaacggatttctgaacaggattgggatgacccagtaaaagtggatcggaaagatgaaatcggcaaattgggccataccatcgaagagatgcgccaaaagcttgtgcaaaaggatgaaacagaaagaactctattgcaaaatatctctcatgatttaaaaacgccggtcatggtcatcagaggctatacacaatcaattaaagacgggatttttcctaaaggagaccttgaaaacactgtagatgttattgaatgcgaagctcttaagctggagaaaaaaataaaggatttattatatttaacgaagctggattatttagcgaagcaaaaagtgcagcacgacatgttcagtattgtggaagtgacagaagaagtcatcgaacgattgaagtgggcgcggaaagaactatcgtgggaaattgatgtagaagaggatattttgatgccgggcgatccggagcaatggaacaaactcctcgaaaacattttggaaaatcaaatccgctatgctgagacaaaaatagaaatcagcatgaaacaagatgatcgaaatatcgtgatcaccattaaaaatgacggtccgcatattgaagatgagatgctctccagcctctatgagccttttaataaagggaagaaaggcgaattcggcattggtctaagcatcgtaaaacgaattttaactcttcataaggcatctatctcaattgaaaatgacaaaacgggtgtaacgtaccgcatagcagtgccaaaatagactgtagatgttttgcagtctatttttttatgtgaaagaatagccgttaaaatctctgtaatttgttttgagcggctgtttgcattgatgaacccattttttctctgacaaggtctgcttcggatatttgactttctccactttgattcctctgtttcgcaagcggctgatcatttcgtccaattctctcattctagattcaccctttcgcttgagctttgaccattcggtcatctcaatttataatataaataatacatgataaaaaaacaagttacaataaggttaattttataacagacggtgtgactatatggtcatatcctagcaggcctccgggctccgaaagggtggaaccattgaaggaaaaagaaaaactgattattgaaacagccttaaaactatttgcccaaaaaggatacaactcaacatcagtccaggaaatcgcaaaagaatgcaaaatatctaaaggcgctttttatatttattttccttcgaaagaagcgcttcttctctctatgctgaactactattatgataaaacgtttacccgaattttaaatattaaaacgaagggcgacagccccagaacggcttaccgtaaacagctgaccgtcctctatgaaaacattcttgaacacaaagattttatcagcatgcagttgaaggagggttctctgccttacacagaagaagtggagcaatgcgcaaaaaaaatccgccagtcctcacttcaatttcatatcgacagcctgctgaacatctatggaaaaaaagcggaaccctacactgctgagctttgttttttaatagagggcatcagccagatttacctggaatgcatgattttgctcgggtacactgtgaagccgtctcaattagctgatatcattatgaatcgaattgatgatatggtaaaaggcatgtctgaacgaaacgataagcctttcatcacattggaagaggcgagctctttattcgggcctcttacgcacggacggcctgacccgctgactgaatcaattgtgaaaagcctacgtgacaaaattaacagcttaaacacaaactcctctcttgaattatcggagagcttggacatacttgaagcagaaatgaagaaaaaaacaccgaagcttgcgatcataaaaggaatgattcataatctgacggagtctgaagctctcgccaaagatgcggaacagcttaaatatttattaaaacagcaacatatttagaagaacggctgcttaaaaagcagccgttctttcttcctattacgcctttggttttaccatgtcttccggcttaaccatttcgttaaattgctcctctgtcagcaattcaagcttcaaagctgcttctttgagcgtcaatccctctttatgggcaagcttggcgattttcgccgcgttttcataaccgatatgcgggttcagcgccgtaacaagcattaatgaatttgacaggttttcctgaatggtttctttattaggctcaataccgacagcacatttatcatggaatgaattcatgccgtcactgagcagctgcacagattgcaggaagttgtaaataataacaggcttaaacacgttcagttcaaagttcccctgacttgccgcaaagccgattgtcgcatcgttccccatgatttgcgctgcgatcattgttaacgcttcgctttgtgtcgggttgactttaccaggcataatagagcttcccggctcattttcaggaatgacgatctccccgatgccgcagcggggtccgcttgcgagccatctgacatcgttcgcgattttcattaagtcagccgcaagcgcttttaatgcgccatgcgcataagtgatttcgtcatggcttgtcagcgcgtggaatttattcggcgagctgctgaacgtttggccggtcagcttagtgatctcttctgagacaagctctccaaactctgggtgagcgttgatacccgttccgacagccgttccaccaattgcaagcgcacgcattttatctgtcgcttccaaaatcatttccttcgaacggtccagcatgtgaacccatccgctgatttcctgtccgagggtcagtggcgtagcatcctgaagatgcgtgcgtccgattttgacaatatcattgtatgcttttgctttttcatccagtgtattgcgaagctgatcaagcgccggcacaagctgctcgtaaacagccaaaacagcggcaacatgcatcgcagtcgggaatgtgtcgtttgagctttggcttcggttcacgtcatcatttggatgaatcgtttgatcagagttcttctcttttaataaagcagtcgcacggttggctaccacttcgttcatgttcatattgctttgtgtgccgcttccggtctgccatacgacaagcgggaagttgtcatcgtacttgcctttgagcacatcatcacaaaccgctgcaatcgcttctgctttttcagcgtccagattgccgaggcgtttattagctagagcagtgcttcgttttaaaattgcaaacgccttcacaacacgcatcggcattttttcagaaccgatcttaaagttctccttgcttcgctgtgtttgggcaccccaaaatttatcagcaggaacttttacttctcccatggtgtctcgttcaattctgtattccatttatgtatccctccataacggttgcttcaatagatcataattcgccaatgacacaaaaaatcctttttatttttcgatcttggcagattttaattttaattcaagatatacgcgggaatcctttgaatatttgtattttggatttgtcctgccgtactcctttgatgtataagagacatcataatgctgttcaaatgatctaatgagctgttcaatttcttcttgttttccagctagccttacctgtgccacttcgtatcctccgctttcataaaaaaacttactccatgaaatactctaacacagtatatcatttttttaacaggaaaagataacctctactaaggttttggataagaggtgacctcattggaacaaacagagtttaaggaatatatacacgataatttagcattggtgctgccaaaattaaaagaaaacgatgatctggtgaaaaacaaaaaaatgcttgcgaacggactggttttttactatctctatttcagtgaaatgactgatgagaataaggtgtcagaagccattaaaactttgattaaagatgaggagaccttaacgcttgaccaggtcaaaaaacgccttgaccagcttgacgcaagacctgttgaaactgcaaaaaaaacgattgaatcgattctcaacggcaattgtgctgtgtttatcaacggattggataaagcctatattctgaccacaggaaagaaaaaaacaagaagcctgacagagccgacaactgaaaaagtggttcgcggcccaaaagtagcgtttgtagaggatattgatacaaatctcgctctgatcagacaaagaacctctcatccgaaattgatcaccaaaaaaatcatgatcggcgaaaacaagctgaagcctgcagccattatgtacattgaaggcaaagcaaaaaagtccgtcataaaagaagtgaaggcgcggcttaaaaatatccagctggaagatatccaggacagcggaacgctcgaggagctcattgaagataataaatattcaccatttccgcagatacaaaatacggaaagacctgacaaagtatcttcagccctgtttaacggccgtgtggcaattttggtcgacagttcaccatttgtgctgctggtgccggtttctctcggcatcctgatgcaatccccggatgactactatgaacgctggatttcagcatctcttatccggtcgctgcgctttgcttctatctttatcaccttgtttttgtcatcgatttatatagcacttgtttccttccatcaggggctgctgccgaccgcactcgccgtcacgatttcggcgaacagggaaaacgtgccgttccctccgatatttgaagccctgctgatggaagtaaccatcgagctgctaagggaagccggactgcgactccccaatccgctcggacagacgatcggcctcgttgggggcgtagtcatcggacaggctgctgtagaagcgaatctcgtcagttcgattatggtcattgtcgtcagtgtcattgccctggcatcctttaccgttcctcaatacggaatgggtctgtctttccgggtgctgcgttttatttcgatgttttccgccgctattttagggctatacggcattattttatttatgcttgtcgtttatacgcacttaacgagacaaacgagctttgggtctccgtatttttcgccaaacggattctttagcctgaaaaatacggatgactccattatccgtctcccaattaaaaacaaaccaaaagaggtgaataatccaaatgagccaaaaacagactccactgaaacttaatacctttcaaggtatttctattgttgcaaatacaatgcttggggccggacttttaacattgccgcgagcgctgaccactaaggctaatacgcctgacggctggatcacgctgatattagaaggtttcatttttattttcttcatttatttaaacacgctcattcagaaaaaacatcaatacccttcactctttgaatatttgaaggaagggcttgggaaatggatcggcagcatcatcggccttttaatctgcggctatttcctcggcgtagccagcttcgagacacgggcaatggctgaaatggtgaagtttttcctgctggagagaaccccaattcaagtcattattttaacgtttatttgctgcggcatttatttaatggttgggggcttaagcgatgtgtcgcggctgtttcccttttatttaacggtaaccattattattttgctgattgtgttcgggatcagttttaaaatttttgatatcaataatttgcgtcctgttttaggcgaaggccttggacccattgcaaactcccttaccgtcgtttccatctcttttttaggaatggaagtgatgctgtttcttcctgaacatatgaagaaaaagaaatacacgttcagatatgcgtctctaggatttctgattccgattatcttatatatccttacgtatattatcgttgtcggagctttgaccgctcccgaggtgaaaacgctgatttggccgactatttctctctttcagtcctttgagcttaaaggcatatttattgaacggtttgaatcctttttactggtggtctggattatccagtttttcaccacatttgtcatttacggatactttgccgctaacgggctaaagaagacatttggattatcgactaaaacaagcatggtgattatcggcataacggtcttttatttttctctctggccggatgacgccaatcaagtcatgatgtatagcgattatcttggctatatttttgtctccctgtttctgcttccgttcattctctttttcattgtagctctcaagaggaggattacaacaaaatgaaaatccggattttatgtatgtttatatgcaccctattgctgtccggatgctgggacagtgagaatatcgaggaattaagcttagtgatcggagtagggctagacaagcctgacgatgaaaatttagagctgacacagcaaattctcgtgccgaaaataatcagcgccaaggagggctcttcatctgatccgacacagctttctatcacaaagggtaaaactgtccatcaaatgatgagaacctctgcattaaagcataagcctacgttttcacagcatttgcgtctcattctgctttccaaaagcgtgattgcggatcaaattggaatggacgccattattaaccagtttgtcagagacaacggaacaaggaggagttcctacgtctttatcaccaacggccgaactaaggatatatttaacatgaatgatgaaggcgaacccgcatccaacgtgatatatgatctgacagagaataataaggtgacgatcagaacgatggagccagttacattgggggagatctcagaacacttaacctctgacgattcattcctcatccctcatgtcggtaaggaaaacggcaagctcgcgataaacggagcctctatcataaaaaataaattatggcaccgggacctcaccccgattgaggttcaaaatatcagcttattttcaggcactgtcgagggaggcgtcattgacttgaagcgcgatggccatctcttttcttatgaagtatattcaagcaatcggaagatcaagacggcatacaaggacggaaagttcaaattcaccgtcacccgcaatattgaaggtcgtctatctgaggactggaatcccaatgaagactcgtttaaggattcatatattaaaagtattgaaaagacagtcgaaaaacgagtacacgaaacagtaacgtcatttattacagagaagctgcagaaagagatcaaagcggacgtaaccgggctgggaaacgaggtcagaattcattatcctcaaaagtggaaaaagatttcaagaaaatgggatgatgattatttcagcaatgcggaaatagactaccgggtcaatgtgattgtcagagacttcggaacgaaaggcgcaaacaaatagcagccgcctaattcacgagatgatttcggtgcgcgtacaccgccgcctgcgtccggtcactgacatccagctttgataaaatattcgtaatatgtgttttgactgttttaatcgtaataaacagttcctcgcctatttctttgtttgtctttccttctgcgatcaggcagagtatttcgagctcccgttttgtaagcgattcatgcgggagcgcgttttcacctgagtggcgcagcctggataatacttttcccgccacttttgactccagcttcggctctcccttgcttgcggcgcggatggcatcggcgatttctgccgcttttgaggttttcaacagatagctgagcgcgccagcttcaataaccgggtacactttgtcatcatcaatgaagctagtgagcacaataattttcgggtcggaaagctcccggcaaatttgctttgtagcttcaatgccatccatgccctccatgacaaggtccattaaaatgacatcaggcgacagttccacagcaagccgaacaccttcgctgccgtccgatgcttcgccgatgacttcaatatcgggctgcgcctccaaaaaagccgcgagccccattctgaccatttcatgatcatcaatcaataatactcgaatcacgttcgttctctcctttttcttccggaaaaatcgggaccttcacttcgatttgagtgccttttccttctactgaaatcacttcggcgacaccgccgatttcacttgcacgttctttcatagaattcaagccgtatgaggaggctttcacctggtccattttaaagccttttccattatcaatcaccttcagacggagctggctgttctttatgcccagaatcacggttacttttgacgcttttgaatgtctaaatacgtttgaaagggcctcctgcacgattctgaacaagtggtcttcaacacccttggatatcgctgtgtcctgtatatcccactcaatatcaatcggctgcttttttcggaactcgtccaaaagctccgtaaggccctccttcagcccttttccttcaagggtaacaggccgtaaatggagcagcagcgccctcatctcattttgggcttcgcctgccatatgctcgaccatcttgatccgcttgactgttttgtcatcagcatccttgacatgttccagcacggctgatgtcatcatcgatatggcaaagagctgctggctgaccgcatcatgaagatctctagccaatcgctggcgttcttctgagataaccgacttcttcatttgagcctgccattccgcacgttcattggaaagtttctgcagggatgcgacttgaagctccacgcgcttcgccatttcgttcagctgatcagcggccaggccgatttcatcatcaccgagcggaggtatccgataagcgaaattgccgttttcaaaggttaaaatggattcaattaatgtatcaatccttgtcttcaaccggttgccgtacatataccctgaggcgaaaccgactgtcacgctgatcagaagcaaaatcaggataaacggaattccgaaccagcttgatgacagcaaaacaagcggatcgagccgatagtaaaacatcataaaggaaatcaggcaggcaaaaaggagcaggctgattcccgttgtcatgcggatggcgcgccattggaggctggcaagcattttttttctcatacgtacttcacatccacatcaccgataaataaggaaacggacacttttacccggcgctttgactcgctgaaatcagttgacgcggcatataccttcgtgcttaatccgcttttcttcgagccgatcagattaatgtcacctataaaaacagctgagctgacagccacttcaaggtccgatggtacataaatatcaacgttaccaatgactccgctaatgacgattgtactttctccctcgggaatcattgctttagataaatcgattttgatatcaccgataaaaccagagacatttaaatcattcaggtcaaacggctgcttcatcatttgcagctcaccgataaaaaagctgcgcatgtcgggatgttttacatcttttggcggatcatgatgttcttttttattgagattgacctgtttctcattcggttcaaatatcggcttccctttgataagcctgtagccggcgtaaatcagaaatgcggcaaacgcatagccgaataaattaaaggtgatgctgaagaggtttttcaaaaatagaaacgcggcaaagatatacatgacggagccaagccaatcacgggaatattttttaaggaaatagccggcaatcagaaaaaagagcggccaaaacagcagatcgcctattccgataatttgcaaaaacatactgatgccgaataaagcaatgatcaatccgagaagctgtttttttgtcattcctggtgtccgcctcctttcttctgcctagtgctaccgtatcgctagatccccgctgtccgttttgatgtcgattggatgctggccgcttccttgcgtgcctgtgatgtgatgctgttctttatgtgctttatcagcaaatgaatacggcgaactgacgtcaccgcttgctgataaagcattgactgcaaagctgccgttttggggaaggcttacattagcatcaccgcttgtcagcgtgacagatacgggaccggttacctttttcaatacagcattaaaatctcctgaagtcattttcacatcaagagagcctgatacatgaaccagatttgcgtcccctgaagctaaatcaatgccggctgttttggagacggtatttgaaatggaaacatcccccgatgatgccttcactttcagatcttgaatgcggacgtccgtcacgctcgtatttccgctcgcagatactgcgttcagcccggaaagcgcaagatggtcattcccggccacagacacgtcaccgcttgaggttcgtactgccagatcacctttataatcatacggaagcctgacgataagagttgaacggttaaatccattcaaaaattgaaattctttttcctttacggtcagctccagttttcttctgttttcagtaacaaataactttcctgagtctcctgaaatgcctgccgatatgtcacttcgttcttccgctataatccggacatccttgctatccgactcaatgaccatgctgtcaatgtcccgcggcgatgcgctggctgaatcagcttctgtgccatttatgaaacccaggcctgcagcaaacacatcttttacgacaacagcgaaaaaaaccagaataccggcagtgatcaacagtttgccaagcatttttttcattcggtttcatccttctcattcattctattataaaggaaaagcttgcgaattgatacgtgcggaaggggaaggacttgaccgcaaatccttccccgttccgcttattcatttgccgcttgtgtctggtctgatttttgcagtgaaagtgtccgcattttttcaatctccgcttctacatcgtctgcgaattctttacgtgtaagttctgtgccggcttccgctgactttgaataattcgcgcggatttccatttcttcaatacgattttcaatacgcaaaaattcacgatacgcgctttcactgtcaattttgtcaaatgtggtattcatatgctctttagctttcgccgcatttgcccgcgcaatcagcgcctgttttttatcctttacgtcctgaagctttgtttcaagtgcagccagttgctctttcagatcggccagctgactgtttgcctgttcataggaagctttatgctcagccgcctttccttctaaatacttcatttcagtcagcgcctttttcgccagttcttcttcacctgcgtcaaatgcgagctgtgcctgatttttccgttttccagccacttcagcggcttcttcatattttttcttaaattgataggcaatggtgtgctgtttcacaattgtttgctttgcttttgcgatgtcgctttccatatcgcgtacatattgattcagcatcacctttggattctccattttatcaagtccttcatgaactgacgcaacaaacatatctctgattctttttaataccatacctaattcctcctaatatattgatattattttttcttcaaaaattcttcccattcatcatcaaagtgagattggtaggcagcagaagccggttcaggatcaaaagatgatacaccgttatcagctgatccgtttttcatcagcttccagccgtaatacaccatagcggccgccaatgcgattccgacgacaaacggaagtgagcagatgagcataatggctccgataccgcccacgatgattcccgtgatggtttttcccgcggcaaaccttttgactcctgcgtatgtcatcaagctcccgatggcgagcgggatgataaagccgaagcttcctcctccaaaaaagacggatatcccaaatacaattaataagaatccgcctatagttttcttgttgatcttcatgcagatcctcctttcgttttccttgtcttcatcttatacaagttagaagatatgcaaaacgaatcagagattgatttttatataagaccggagtcgtatctcggacaggacccatcggcacaaaaaaacgccatgcacgaggcatggcgttttaaaaccctttacagatgaacacttgcttccctttctttaatcaggtcggacctttctgctttggccagttttgtaaacagcaagattccgatacccgcaataatttcgacaatcccgccggcagcaatcactgttcctgagccgaaagcattagcggcatacccgcaaatgacagctccggcagggatcgaaatatttgagatcatatgtataacggcgtaaacctgcggctgatcctcactatccacagacgtctggataatcgtgtactcaggaacattaacagcactgactgcggcaccaaaggtaaaagcagcgaaaaagacgagcggcaaaaaggtattcatccctgtaataaagaaagcaaatccttcaataatgccggcagtgacgaataacaagccgtacctgtttaccttgactttcgccagcacaaaccctaataaaaacgcgcccgcggcggtggtggcctttaaaagcgagtatacgatcggctggccgtttaaatcttccgcaacgtatacggcagagagcgcttcccatggggcagccgcgaaattcataaagatacagtaaatggcgagcggatataaaatctggtgttttctgacgagcctaaagccgcgtttcagtcttccgatatatgtgcctctctgtgtaacaaccgcagactctgattgagattcaaccgcagtgtacttaataaaaagaacgagaaaacctgacaccaaatagagcacaagtgcgataagcatggtataagaaggactaataaatgtaagaaaagcgccgcataatgtgacagccccaagccggacaatttgagcggaggattgcagcacagcgtttgctttttgaatgccctgttcattgacgatttgaggaatcaaagcgatagaggcgggattgtaggcagctccagtagctgaatgcacaatcataagcgtcatgacaaaccacagcggagagaagcccgcaaaatgacatagagggataatcaaaacaatcgccgcccttgtcagatctgaaaagtacatccaaaatttcagcgtggtctgtttcataaaaggccccgtcacaggcgccagaacggcttccggcaaaaacgtgacagcaatcaataaagcagtgccgatcgcacctttgccgtcataaattaaaaaccataatattgaattaaatgcgaacatatcgccggatatcttgactattcttgagaaaaacagataattgaaatttctcttccagatgctatcactttcaattaaattcaccatccatcagagccccccgttgcctattttttacatctatttattacaatatctcatttttccatttttcagtcaataattcataaggttcattttttgtcgtaaaatgggaaattgacagagtgaaaaacaaaaaaagccggcatgtatttgaacacgccggcttccttttcactttttatgattcgctgctgtttcggtcccgaaacacaatggcacttctttcatattctacatcgccaataccgcttcttgcattcacaacccgtgcggcggcaaagaaataatcggacagacgattgagataacgcagcactgtttcatgaatctcctccgatttcatcagcgccaccactcttcgttctgccctccttgtaatggtgcgggcgatatggagaagcgaagcacctcttgatccgcctggaagaataaatttcttcagttccggcgcttctgctgtataggcatcaatgcgcgtttctaaaaaggaaacagattcttccgttagtttgtagtcttttctttctgtgacgattgccagatcgcctccgcagtcaaacagctcatgctggatggtcagcagctcggctgtcagatcttcaaagccgggctgcccggaaagctctgccaaagcaagcccgataaagctgttaagctcgtcaatcgtgccgtagctttcgacgcgtaggctgtccttgtccgttctgcccccgactaagcccgtttgtcccttatcgcctgtttttgtatatagtttcataccctgaatctcctttacagacttattcaaacaactcagcagcctcttttacacattcagctgtccctttctttatcaattgattcagccgctgttctatgttttcggattgctgagtttgagtcgcggcgatgagaatatcacctgtgcctcctccgtctcccagcactttcgtccgttctgcttcggcagccataagagctttgatgaagaattgatctgccgcatagccgtttatcaaaatccaaatcgaaaagccggtctgaacgcatatgaaaacggataactctctgtcttcatacgttcgatacacgaaacggtcaagtctttctgaagaagccatcgcacacgtctcctgcagttgaaaaccgctttctgaaagacaggccgtaagtccttctatcggatctggctgatctggcagccgtttatggatcagcgtcctgctccacgaaaaccctgcaccgataggcgtcgaggacaatgttcgaagcgggatttccgtttgcagaagaatgtcatcacgccccgcttggagcaatgcttcaaatgggatagactgccgcttcacgctatctttttcaggctgaatcacaatcatcggtttaggtgagctttgatgaaccaaggcggtgacatctgtatcgtacaccgcctttatgctttgttctgtaacagcatattccggtttttgcttaggcccggcggtaccgtttttcataaacatgagcccatcacagtacaggcttgcggtgttcagatcatgaaaaacgctgacagctgccaatccgctttctctcgtcaggcgtttgatcagatcaagcaggtctttttgataagccagatcgagaaaattagtcggctcgtccaaaaataaaatacgcggctgctgcgccaaagcttgtgccaaatacacccgctgctgttcccctccgcttagttcgcgaatcggcttttgcgcaaaatcggccactcctgtttgctccattgcttcctgtacaatggcttcacccttttcagtctgctgtctgaacagccccgtttggaatggatatctgccaaaggctacagtttcttcgacagtaaaggtgaaggcttgatccattttttgcggcaggacagccatgatttgcgccagttccttcggtttatagtccgccagcagttttccggccagataaaccctgcctttcttggccggcagcgtacctgtcagcaagtgcaaaagcgtggtttttccgcttccattagggccgagaattccaagaaattctcccttctccactgttaagctgacattgttgattaggcggctgtcgccgtatcctcccgacagcccttctgccttcatcataagcttctccccccgcgatgctgccgaattaaaataagagcgaacacaggcgctcccgccaaggacgtaatgatcccgatcggcagttcaatcggctcaatgatggttctggaaagcagatcggctaaaacaagaaaccctgccccaagcaaggcggacaacggcagtaaatgccgatggtccgttccccacaaaagccttgtgatatgcggaatcacaaggccgacaaagccaatcgtacccgatactgccacagcgcttcccgtcaaaagagatccggctattaaaatcatcatcttcctctgctgaacgctgactccaagaagctttgctttatcttctccatatgtcatcacgttcagttcccttccgtttataatcaataaaatggttcccaaaagaaaaaacgggagaaacaaaataacatagctccagcccctcattgagacgctgccaagcagccaatgcacaatcggaagcaggttgtctcctgtcaaggcgatgataagagaaataaatgcgcctaaaaaagagttggtgatgacaccggtcaaaatgagggtggaaacagacatcgaagcatgaacgaggcggctgaagaaaaggaccgccgccatcgtggccagtgccgcggctacactcaaaaccgggagtgtaaaccctccgatgacaggaaggtgcaaacctaagaacagagtcacaacagctccgactgaagcaccggatgacacacctagcgtatagggatcagcaagcggatttttcaacaatccttgaaaagcggcccctgcaatagaaagagccgcccccacaagggcggccagcacaactctcggcagtctgatattcatcataatattagtgtacatcggatcatcagaaccgatagagccgccgaaaccttgatgccaaaagacacgaaaaacagcgggaataggaatatgcaggctgccgcaagaaattcctaagatgatgctcacggctaaaaatgagaaaccaatgatatatgcggcataacgattattccttaaacgtatccgggtaaatgctttccgcaagttcttcgaccccttcgatcagacggggaccggaacgtgtcacaagatcagggtccacatcatatacacgatgatgtttcacagcattgatttcgctccagccatcgcgtttttccacagctttcgctttcacaccgtccgttgtaacaattgcatcaggattgagttttacgatcgcctcgtctgtcatttgcacccatcctgtctgatccgcagctgcgtttttagcatggatgacatttagcatttcattcataaacgtatcttttccggttgtataaatgtcaggatcaggagaaacctcgataaatacgcttttctcctcgtcttttgaaatggttttcgctttttcttgaatatcctttagatctgatttcatgcttttcacgagctgatcggcttttttctccgccccgccagcttctccgatcatttcgattgatttgtacacctcggagaatgattgtgcatcattgacagtcagcactgtaatgcccgcgtccttcagctgtttgatggcatccgctgatgctgacatggaagactcatgggccagaacgagatctggttttagagaaatgactttttcaacgtttacattcatatctccgactttctcaacctttttgacttcctttggataggtatcgtttgtggtgacaccgaccactttgtcaccaaggccgagtgcgtatgtaatttctgtgttgctcggcattaatgaaacaatcttttttggctcttttttgatggttacatcttggtttgacgcatcatcaatggtgacagggaacacttctgttttttgttttgcctttgaatccttctgatccgcaggattgccgcagcctgccagcataacagcagccaacagaagcgcagcccatatcccggctcgttttttcataatcttttcctcctaaacgaactaaaaaagcatctctacgacggtaaagatgctgtaaacaacacaaaaaagcctattgtttacacatcatctgtcctcgcagaattcgtgctgatcaaacaggcaggtatcctggctcttggcgcttggccaattacagtggcgggaccgcaccggcttttaccggtttcccttttaagccggctgttgttcacggaccggcacctatttgacattcgtatccgtttttcggagtaattatactatatgactgacaggcttgtatatgtgtcctgaatgacttttccccatattgtgtatggaagcaaaatcctcgtaaacactaaatttgatcttgtatacttaataccatcatctatcaaaaggaatgattcttatggatttacagctaaaagaaaaactcgtcttaatcaccggctcgacgtccggtatcgggaaagccgccgcaaaaagctttctgcaagagggtgcggcagtcattgtcaacggacgcaaacaggagactgtcgatcgcaccattgaagagctttctggctatggaacagtgcacggtgctgctgccgatttgtcaaaaacagatgaagcagcggcttttatcgaaaaagtaaatgaaatcggtgatatcgatatccttgtcaacaaccttggtttcttcgaggtaaaagacttcgccgatgtgacagatgaagagtggaatcaatatttcgaagtgaacgtgatgagcgccgttcggacaagccgtcacttccttccaaaaatgcttgccaaaaacagcggccgcattttaaatattgcaagtgaagcaggcgtcaaaccgctgccaacgatgattccatactcaatgacaaaaacggcactgatcagcctttcaagaggaatggctgaaatgacaaaaggcacaaatgtgacggtcaactcagtgctcccgggacctacttggacagagggcgtggcctcctatatggaaggcgccgcacaagcagccggacaggatacagatacatttatcaaagactatttcaaggtcaatgagccaacctcacttattcagcgatacgcgacagcagaagaagtcgccaacacaatcgtattcctcgcgtctgacgccgcatccgccattaacggcacggcacagcgtgtggaaggcggcattatccgttctctgtagtataaaaaacgcatccgttgtttcggatgcgttttttttatacgtctccagcaaatggtaccggctgatatccgcctgtttccagttgtgctgaaaacaaccctccagcgtgaggctgctcgtatctctctttttctgtcatttgttctgttgccgttgtaatgtaaagggtttttaagtctttgccgccgaacgcgcagcacgtgacatatttagccggcacgctgattgaattgatttcttttttctgaaacgggtcaatgtgaacaacgcggctgccgccaaacagcgccacccacagcatgccattttggtcaattgtcatgccgtccggcaatccgtccgactgatcaaaacgatagacaggttctggattcgaaacatccccgctttgaggatcatagctgtaacgtacaatctcctgggtcggcgtgtcgatgtaatacatcaaattccgctcgcggtcccaatccaaaccgtttgaggtggagacttgatccttgattttgacaagactgccgtctagattcaaacggtacagcgacgcctgtttttgctcgccttccatgctcgtcgtccccgcccaaagccttccgtacgggtcacatttagcatcattaaatctcaggctctcatgcatgtccttcggctgtttaattttttccaagctgtcatcccgaagatgatacaggtaaaacccgtccttcatcgtcataatcagttcatcctttgaatatttcgcaagcgccgtcacaaaggatttgaatttgattgatcggttgattttttcttcagggtcaaagatgtggagctcgctccccaggatatcaacccaatataagcggccgttttcttcatcccataacgggccttctccaatcactgcccgagtgtctgcttccaatactgcatccatgtgttacacctctttagcttcagtctatatattgttattcccggcaaagaggtgtccaaaccacttgatgtttattgttttttaaaaaggatggtaatgaccgttccaatgttcattctgctgttcacatggatcgttccgttatgcagatggacaagctccttggcaatcgcgagcccgagacccgttccggcagttgaatcttttgtgttcgtccctctgtagtaacggttaaacaaatgggtaatcgtttcttcatccattcctttcccattgtccttcacctttaaagatatatgattttttgtttgctccagaatgacttgaatctctgttcctttgtcgttgtgcttcacggcattcccaaggaggttttctaatatgcgcctgaaccacgcttcatcaagggcaaattcaatatgctcttctttggatacaaacgagatatcatagccttcagaaaacggatttttcttaaaatcctcaatgacatttttaaaaaacgggataaggctagtgagatttctctcaataggaagagcatcatttttcagccgatacgttaaatttaagtcttcaatcagcttagacatgtattcagatttttctctgacaacctgccccatttctttcacttcttccggcgaccagtcatactgcttcgactcgagcatcatgctgtagccgtaaatgctgctgagcggtgtttttaagtcatgtgacaaaccggcaatccattcttcccttgtcgcctggattttttctctgtttcttttatcccttctcagcgtttcagtcagctgatccattgattcaaatatctcaccgaagaagcggtacggctgtttgatttttccctttttatttttgctgacaggacggccttcccggtttctaggttcctcaagcttcccttttgacagattgaccagccatctaatcgtgtgaaaaatcggcagcccgaatcggaacatataccaaacggtcatccaaatgatatacatgaacaaaacggccatcacgagaaacatcgcttttaatacaaccttcaggaatgatttgttaaactcctgatcggttacatagactgggtttggcaccgtagcgaccatccatctgtctttattgaggatcttaacggaaatttcccgcttatagttccaaggcttagagctgtatttaagcagctccagctggttcatcgtttttctttcgctttttgtgctattgatgctgtcgagaatctttccattgctgtctaacaggtaaatggcgccttttttccgtttaatatagtcgatggtactagacttatagtgcgctagtgagtctatcttttgttcacgcttttcaacggaagtcaggagctgttcactttttgatttccagccggacaatagaagatacgacttatcttcaatattgatggcccaataattcagtttatagttatgaagctttttggttttataaatagacaaaagctctttcttggtataggtgcccggcacgtcttttggcacgccgtaggaataatcagtgtttccttccgaatcaatgatttgcatccagccgtgctgtttatcaacagatttcttcaggaaattatccacttcccatgtcccgtcttcgtttacatcgagatatgcctcaagtgtgtcggtcgttgctttcgtcagccctgaattggattccgcatcgctaaaacgggcgtctaaatagaaaaacgatgcaacaagcataaccgtaagcagcaggatcacaatcagcatctggccgaaaaagtgaaacaaaaacttccatcttaacctcatgaccgcttgccttcaggatttgggataaaacgatagccgagacctcgaacggttacaatatactccggattgctcggatcgcgctcaatcttctccctaagcttgcgaatatgaaccatgacggtgttgttgtcaccgtaggaaggatagccccatactttttcatatatttgatctttggaaagcaccacgttagggtgttcacaaaaatactgcaaaagctgcagaagctgggctgaacaggcaacggcttccccgcctacgatcaactcggcattttgcggagaaaaagtaaagtaatcatatgtgtaggtttgatttgaactcgtttctttcgattgatatgtacgcttgagatgcgctctgatccgcgccgctaattccagcggattaaatggttttgtgatatagtcatcagctccaaccgcaaagcccgataatttgtccgcgtcggatgatcttgccgtcaggaaaaaaatcggagcgtctgaatactctctgatcaatgtgcaggcttcaaaaccggacattccgcccatcatgacatccagcacaatcaagtcaaccttattggccttcacaacgggaatcgcttcttctgcgcttgccgcatccagtatatttcgataaccttctttttcgagaacgcgtttgatcatgtccacaatcgctttctcatcgtctacgattaaaattgacgcattttccacttttatgttcctttctgtcactgtttttttcatcttatcattatatcgtttatttatggtacatttttgaatacattggagcttggcaaatcaaaacagcaaaaaaggagcaaacaagcgctcccttttgatgttttttcatatgaaaatattatgagttctcatctaccatgtacaaaataaactcccaaaaccccggtacatcctgacataaaagcatatcagccttttcaaacattttgatcttcagctcttgctctaaatcttctctttcttgataggacgtattgctgagtttttttctgatcatcggtgaaaagcatgcaatcaggtgctcaatgtcataagtctcgtctttttgtttctttttttgttcaaactggccgtccacagcttacttttccccctttttttgcgccgctaactgctttctgatattctccagcccctttttatgaatgttggagatgttttgtcgggactcccctaatgaatctgcaatctcctgcatcgtggcaccgtgaagatagactttcgtcagcacacttttttgtttgtcagtcagcttctggatcgcttggtagagctggtaatcctgtacatgctggctcaaatcatcctgcctgtctaaaaattcttcaaatgcatcgctacctgtttcggaaggaagccgatctcccgcctccggatgatcaaccgtcagcggataccgtttttggtttttgcgaacccgcttatcaaaatcaatagaaaagatgcgaatcattgaattcatatacttgacgatgcggatttctttataaaattgcttaaatagctcgtccaatgatcttgcatctttttcgttagggctttccattacgtttttgaacaaacggtaatgctgaggattgctcaaaaaatgcttcacgatgggatgcttcattatctccttacattttgaccgtaaaagactttgatagtccatcaaaccgcctccctactaaattaaatgaaggaaagcaaaaaaaagtaaactactactttccgcctagtgtcttccaaaatactttgcagcagtttacgttttatcggttttcctcacttacatacatgactgcagaaaaagaagggaggtattttcctatggatcaggtttttatagaggaagtcgtaaaacagatcggcaatttggggtttcccgcgctgattgcaatgtatctgctgacccgattcgaaaagaagtttgatcaactaatagaactaatgacagaaatgaaagatcatgcaaaaaaataatttttcaatcgaagttgacttttcactggtttttttcacttaacaaaacagaagggaaaacgaaaggcctttcaccttctctttctgctatcacatttaaatgtaaggaggaaacatttcatgaaaaaacaaaatgacattccgcagccaattagaggagacaaaggagcaacggtaaaaatcccgcgcaatattgaaagagaccggcaaaaccctgatatgctcgttccgcctgaaaccgatcatggcaccgtcagcaatatgaagttttcgttctctgatactcataaccgattagaaaaaggcggatatgcccgtgaagtgacagtacgtgaattgccgatttcagaaaaccttgcatccgtaaatatgcggctgaagccaggcgccattcgcgagcttcactggcataaagaagcagaatgggcttatatgatttacggaagtgcaagagtcacaattgtagatgaaaaagggcgcagctttattgacgatgtaggtgaaggagacctttggtacttcccgtcaggcttgccgcactccatccaagcgctggatgagggagctgagttcctgctagtgtttgacgatggatcattctctgaaaacagcacgttccagctgacagattggctggcccacactccaaaagaagtcattgctgcgaacttcggcgtgacaaaagaagagatttccaatttgcctggcaaagaaaaatatatatttgaaaaccaacttcctggcagtttaaaagatgatattgtggaagggccgaatggcgaagtgccttatccatttacttaccgccttcttgaacaagagccgatcgaatctgagggaggaaaagtatacattgcagattcgacaaacttcaaagtgtctaaaaccatcgcatcagcgctcgtaacagtagaacccggcgccatgagagaactgcactggcacccgaatacccacgaatggcaatactacatctccggtaaagctagaatgaccgtttttgcatctgacggccatgccagaacgtttaattaccaagccggtgatgtcggatatgtaccatttgcaatgggtcattacgttgaaaacatcggggatgaaccgcttgtctttttagaaatcttcaaagacgaccattatgctgatgtatctttaaaccaatggcttgccatgcttcctgaaacatttgttcaagcgcaccttgacttgggcaaagactttactgatgtgctttcaaaagaaaagcacccagtagtgaaaaagaaatgcagtaaataaaagacttgcggcttgcagagagcactcgttctctgcaagccttcataaggagctgaaccagtgaaacatcaaaacccttcaaaacgcttattgcggctctccataaagtacttgctggccgcagcagcagtggtgttgacctattttgctgtcatctatatattgttttctttagcgggaacgagctaccgctcagcagctcatgtcctgctttttgccgtggtatttcttgttctcggattatgctttgaaccatttgaaaggctgatgatacatagctttacatttttcaagacaggaaaacgtctattcattctccttgccggcatcgtacagctgctatttttgtggatgactgctcatacaacagaccaattgatcagcgacatctggctgtccaccacagaagaaatgattgtcgcagccgtttttttgattttagacaaatgcaactcggctcttcccagctaaaaaaagaacgcattccaattggatgcgttctttttattcatagcgaagcgcgtctacaggctgaagcttcgaagccttgatagacggaagcaagccgaagataatgccgactgccattgaaaagatgagtgctccgacaacagctggaatggagacgataaaaggcatcggaaaaatgaccgtcagcagcttggcgatgccgaagcccgccagcacaccgagtattccgccaatgcttgtcagcacgacagcctcggttaaaaattgaaataaaatcacacgccgcttagcaccgagcgctttcttaattccgatttccctcgtgcgctccgttacggaaacgagcataatattcatgacgccgataccgcccaccaaaagtgaaatactggcgattccgccaagcagcaatgcaaatgactgattaaaggactccacttcctgcgcgatctcctgaagatccattacactgtactctgctttttccagctcagcttctgacagtccctgatttaaaagatctgcagccattacacccgcttcttggatatgctcagaagaatcagcctgcacggcaatctgtgttggcgcgtcaaacccttcaataagcggccacacttttttcggcacgtacaaaaccgggttcgcatagtcgccttcaaacatgctttcctgttgatttttttctttaaaaacaccgacgaccttaaacggcacaccattcatctcaatgtttttatgcagagcttctccgtctggaaacagttcatctctgacagcttcattgatcatcactacttggtgtgtgctgtttaaatcgttttccgtcagctttctcccttcggttattcggattggaaacatgtcgaagtaatcatcgtccactccatacacttggggatacgaaacgtttgttaaatgaaaaacgctcgcgccttctgacaagtaatataaggataatcctttgaccatcggatctgatttgatcgcctttactgtttcttccgctacaggcggcgcggacgcatacgacacctgagggccgccgctctcctcttctccgccagacggctggtagacaacgttgatcgcgttgtttcccatgccgatcatactttgctttaattgctcactttggcccttcagcattgaaacaatcgcgatgattgccgctatgccgataatcacgccgagcattgtcagaatcgatcttaatttatgagaaaaaatggattgaaaggagattcgaatatgttcaagcatggctgatatcccctctctcatctaataccagctctccgtctctgataaaaacggttctgtcagcttttttggcgacgtccgggtcgtgggttatcataataatggtcttgccttcccgatgcagttcagaaaacagtgacaaaatttgttcacttgatttggtatcaagcgccccggtcggttcatcagctaaaataaacctcggctgattgacaagggccctcgctatcgccacccgctgcttttggccgccggacagcttaggcggtttgtaggagaccctgtcttttaatccgaccttttccagcgcttcatatgcccgttgccttctctcttttttcttcactttattgtagatcatcggcagctcgacattttgcagcgcggtgagacgcggcagcaaatggaaagtttgaaacacaaacccgattgattcattgcgaatttcggctaaagccccgtctttccctttcaatatatcgatctggtcaagcgtataggttcctgaggttggcctgtccaaacagccgataatattcattagcgttgactttccagaaccggaaggccccataatagctaaaaactcccccgcctgaacagtcagattgatatgtttcaagattggaacttcttcttttcccagcttgtacgacttcgaaatattattcagtgtcagcattgactgtaacctgctttccttccttgaccgcgggatcaggatagatcacataatcttccggcgtcaggccgctcttaatttccaccatgtcattttcatcagtctctccgatttcaacaggctgcttaaccgctttgtgattctcatcagctttccatacgtacggttcgccgtcatcctgaatgaccatgtcggacggcagcttgatcgtgtccgcatcagcattatcactcatcacttcgatgttgacatgatagccgacttcaagacctttatggctgtctaataaaatggtgaaaggatagttagaggactggggattcatttcttcatcagcaaagctttctgattcttcaccctcgcctgctcccgctggaagcttgccgatcgaggtgacctttcctttccactcgccctcaccgcctgttttcagcgtgaccctgactttgctgccttttttgatcgtgtccattaacagctcattgatttggcttttgaccagatatttgcctgtcgaaacaatctggatatacgggcctgctgcctggtcgcctgttgcaccgtcagcgatatcctgattgacgctttgaacgattccgtcatgcttgcttgtaatgacattggaacctttgtttttcgtcaggccagccagttctttttgatgctgcttcagttcaagctggcttgttttcaaatcgaaattggcttggtcaagttcatcttgaagctgggttttctcttctttccctgcaactttcagcttcttttccgtttccgttattgatttttgcaaacggttgatttgcagatttgtcatttcaatttgcaaattggcttgctccacttcatcagaatgatcctcgccctcatactcaaaaagcttatcgccctttttaacctgatcgccttctttgacgtatgtttttttaatgctgcctttttctgaatctatgtatactttctgctgtttctcaggttcaacctttccagaaaacgtttggcctgattctgaatctcctcccatgtataccgcgaccgattcagcatagggctccgatgatacggcaacttggttcatgtgagtaaaaaagtaaaaaccgccagcgccgatcccagccaatacaagcacaccggcacatatcgcaccgccaataagccattttttcttcttggacacaacgatctcctctttctgtaaactatgtaatattttcgaaacattctaaccaatattatctattaattcaaaaagacttgcaatccttttattgaaatgacggaatcaaatagaaaaattgtattttccaagccgaataaaaaaaatcccggcttcaaaccgggattttttcatacagtaactagctctttttcatttttaatcaagtcatatgtcaagcatacaggtttatttgtacggggatcagtcacgatttcggcatcaatctgaaatacctgcttcaaaatgtctggtgtcatgacctccagagcagttccttccttgatgaccgtgccttttttgagcgcgatcatataatgagaaaaacgagctgcatggttaagatcatgaatgaccattaaaatcgtccgcccttgctctttgttgagtctgtcaagcagctgcagaatttcaagctgatgtgcaagatcaagatacgttgtaggttcatccagcagaagcagttccgtcccttgcgcaagcgccatggcaatccacacgcgttgacgctgtccgcctgacaatgcctcaatcggccgttcagcatattcagccatgcctgtttcttcaagcgcccatttgataatccgtcggtcttcgtcatttaatctgccgaatcctgattgatgcggaaacctgccgtacgacaccaattcgtgcactgttaggccgctcggcgcttcaggtgtctgtggaagaatcgccatatcttttgcaatgtcctttgtagacattttatgaatcgctttgccgtttaaatagacggcacctgcatgtgaacgcataattctggacattgtttttaaaatcgttgatttcccgcagccgttcgggccaattaaggtggtaattttccctttaggaatcgatatatttaaatcctctacaatcgccctgtcgccataaccgattccaagctgttccgttgataatgaattcatattcggccccctcctctaattcgctttcatcaataaataaataaagtaaggcgcacctagcacggaaatgacaagtccgaccggaatttctgatggtgccaatacatttctcgccagcgtatcagcaagcaaaaacaggaatgagccgatgaaggcggagaccggtatcagcgtctggtgacgtggaccggtcagccttctagccacatgcggcgcgatcaatccgagaaacgcaatgccccccgcagctgccacgcatgaagcggcaagagtaaccgctgccagaagaagaatccgtctttccttttcaacagcggtgcccagcccggtcgccaattggtctccgagctgcataatgttcaaatagcgtgccttatataaagtaaacagaagcaagatcacaatccaagggagaatcgcccagatcatattccagttcgccccccatattgagccggatatccaaaccgcggcttgcataaaatcatgagggtccatcttaagctgaaaaatcagcaacagggcattgaatccggcattcacccctatgccgactaaaatcagccgaatcggtgtcacgccttttttccatgccagaatataaatgagaaacgcagcgaggattgctcctgccaaagcactgaatggcagcataaatgttccgaaaaagctgagatctgaagctgacccttgaaaaaagtatataaaaagcactacagcaagtgaaccgccggcgttaattccgagaataccaggctcggcaagttcattttgagacacgctttgcaaaatggctccagctacggagatccctgctccaacaagcaaagaaaggatgatccgaggcagcctgaactcaaataagacaagttcatcacgcgccgttccttggccgaaaaagacctgaagcgttttaagcggtgcaattttgataacgcccaaattgagactgataaaaaagaccaccacgataagcaaaaaggtcacagccattacaataagcggtttgtttgtttttgttttcattacagccctctcctttcacgacgtgccaaataaaagaaaaagggaacgccgatcagagaagttagcgcaccgacaggcgtttcaaagggcgcatttacgagtctggccgctatgtcagcaaaaacaagcaaaacagcaccgagcaccgccgagcaaggaatgatccaccgataatccacaccgaccaaaaaacgggtaatatgcggaatgatcagcccgataaatgcaatggtgccggcaatggaaaccgcagctccggtcagaattactacaataagcatgcccaccagtttcactgctgatgtatattgtccaagccctttcgccagatcgtcaccgagacttaacactgtcacagatcgggcgataaaaaacgcgagcgttaaaccgacagcccctgcaataagcaaaagctggacccccgaccatttcacacccgctaccccgccagcgtaccaaaagctgatatcctgagcgacatcaaagcggattgcaatggcagttgaaatgccggtaaagaaataagtaactgccgtacccgccagagcaagctttacaggcgtaagtccgccccttgaaaacaagccgatgcccattaccgtcgatgcccccagccccgctcccgcaaaggaccatagcacaagccccattgcagaaagtccgggaaaaaaggcaaacgcaatcgaaaccgcaaacgcagagcctgatgtcacacccataatcgaaggctctgccaaagggtttctcgtcatcccctgcatgattgctcccgacactgccaacaatgcgcctacaagcgcggcagccgccgttctcggaagccgaagatcatgtataatttggtgagatgtctttgtcggctgataatgaaaaatggcgtcccatacagtgcgcaaatgaatatccgctgcaccgagggatatggataaaaatgcgccaaggcaaagcaggcatagacctgcaataaggacgatgaccgcgccatatgtccttgacgtccattggatttcttctgatgcagtccgtatatttttatgttgactcaactgccgtacttcctttctgttactgataatgattatcaattgctgtttcagtatatcacttttttcagctgatttaatagagtgttttgaacaaaaatgaaaatgcatttgcaaaaatatcgtgtcaaccggcacttgcagtggtataatcacagatgataatgattctctttttcatctattttttagaaagaaggtatgagatatgacccatatatacaagaaactcggagccgcgttttttgccctgttattgattgcagcgctggcagcctgcgggaataactcagaaagcaaaggttctgcctctgattcaaaaggcgcagaaacctttacatacaaggctgaaaacggaaatgtaaaaatcccgaagcatcctaaacgggtggttgtcatggcagacggctattacggctacttcaaaacactcggcatcaacgttgtcggtgcgcctgagaatgtatttaaaaacccttactacaaaggaaaaaccgacggcgttgaaaacatcggagacggcacttcggttgaaaaggtcattgatttgaaccctgacctgattatcgtctggacaacacagggcgctgatattaaaaagcttgaaaaaattgcgccgactgtcgcagtaaaatacgataagctcgacaacatcgaacagctgaaagaatttgcaaaaatgacgggaactgaagataaagctgaaaaatggctggccaagtgggataaaaaagttgcggccgctaaaacaaaaatcaaaaaagcggtcggtgacaaaaccatttccattatgcaaacgaacggaaaagacatttacgtattcggtaaagactttggaagaggcggaagcatcatttacaaagaccttggcctgcaggctacaaagctgacaaaagaaaaagccattgaccaggggccaggttatacaagtatttcattagagaagctccctgactttgccggggattacattttcgcgggcccatggcaatcaggcggtgatgatggcggcgtttttgaaagctccatttggaagaacctgaatgccgttaaaaatggccatgtctacaagatggatccgatcggtttctatttctctgacccgatttcattagaaggacaactgaagtttattacggaaagcttgactaaataaacaaaagagccgcctgcccgcggctcttttgcaaatttataaggaacagctcaatttgaatcatatcagatattttctttgagccattcatattaagctgcatcctcatcgcgatcagtttttttatgctggagagactgaaaaacgttttttgcatattcgattgtgccttaaagtttttctttcgatttcagctttcctgtcagctaggttaacgaacggattcttaacagaagaaattgtgattttataaaaaagacacctgagcaaatcaggtgtcttttcattatgcttgtttttctttctggaactttttactcacaaatgtataaacgattaagccgacaaagaataaaccgatgccgaggataaatgtcgttaaatctgctgtgcctgttacgataacaaacacggagtatgcacacgccagtatcgcgatcaatccgtctcttacacgggagcctttcagctggtcatacgtttcacctttgatgactaccttcaagctgtagattgcagataccagatacggaattaaatatgcgagtgtagccgctgtcgttaaaaatgtaaatgcgtcacttattgtccgggaaataaccgagaaaatgaagacctgtgacatgacgtttgtaataatgagtgcaatgaccggacttccctttttattcgtttttgcaaaaaatgccgggaaatctcctgctttagcggcttggtatggcacctcagagccaagcaaaatccagccgagcatcgttccgaataaacaaaggatagccaaaagcgccataatcacgcttcccgcgtttccaacaatcgcatagagtacatcaacaaatggtttttcagagccgacaagcttatcatgcggcagaacacccatcgtaattaaagtcacaataatatatatgctcaaggcaatcagcaagccggtaattgtcgcacgtttcacatcacgctgagagcgcgcacggccggacaggatcaccgcggattcaattccgacaaacgcccacagtgtagaaatcgcggcgttatgaacctggccgccaattccaatgcttgtgccgttttctccttgaaccgggaaataaaaatgaccgaataatgtcgtttgaaacacaaacaaaccggcaacgataaagaagacaaaacctaatactttagaaagcgttgtgacaaagtttaatttacttgcgccgttaatgctggcaacaagaatcgcgtgcgttccccataacaagatcgtacatacggcaaacgtcagtaattggccgagtgtcacctcttgcccgccgatcgaaaacatctcacgtttatcaaccaagatcgggaagaacgaagtcaagtaaccggcgagacttgtgatgatcgccacgttgctgatccagctcgccacccagtagccccacaccattgtgaaaccggcagcgttgccttttttcgggtcagaaaacagcgctcttgcataactttgcggtcccgctgtcagttcaggcttgcgaatggacaagtgtccgaacacaagtgcaatcatcagcacgccggcacctgtcaaaagccaggcggacgtagctccaaacggactcgcaattgaagcaagcgagctcggcaaggagaaaattcctgatccaaccatatttccaacgacaaacgccgttaataaccaaaaaccccatttttttgtctgttccattccagtacctccatgattctttgtacggaccagaccccgagatcatataaacgcaaaaaaagcctgaacaaaagtccatgcttaaagaaacacacacccttgatctccggatagccctccgcgaaaaagcacgcggcagtcctgcacttattcagatacagtcccagcatagagaaggatcggctttctccacacttcggcgctgatgccttttacacatgtttaacagcccctgtcagcctggcatgtgtgacttatcatccgcgcaacctctacctcactgagaaagagtgaggatttaattattcagttactcccagaaggttatcaaagaaaggatgatctgtcaaagggaacagatggaaaatacggatagagccaagccctatccgcatgtgattatcgattatttttctttttttgcacagcttcttgaagcggatcatcttttagagctgaaccagcatcttcaagagctccttggattacgtttttttctttttcggaacgttttcctttatctttattaaagaaacccattcgtatcacctcttttaaaaaataggtacatgtttaagatgcctcttttatgaaaaattatgcgggatattttttatcgtccaaagtcctgttgatcaaacatacattctcttgatatatttgtaattcagagattttttgcaaaagataaaaggagaagcggcaaatgacaggaaaaacacacatcatgggaggcatcgcttcttgtacggcagcggcttattattatggatttgatccagtgcttatggctgcgtcaggcgcggttggagcattaatacccgatatctgccacacacaaagcaaaatcgggagaaaatttcctattttatcgaaagtggtcagctccgtttttggccatcgtacatttacacacagcttgctgtttatgctcatcatgttttttatcacttctacatacattccagataaaaacatatcagccggcctgatgatcggaatggcaagccacttgattcttgacgcttggacggtaaacggaatcaaattattattcccttcaacgatccgcgttcggcttccattatatatgaagacaggcagtttttctgagcagctcgtgctagctggcctgacccttgcttcatgttactacttttatatgctgtttcatgggcgcatgttttaaacatgagtgctgagacttgtctgaaccggctgtttttagtaggttttacttaagaagcatttcatgcagatgatcaagaaaacgcgaggagtcatattgatgaaaggaaccttttttcacaatcagcggtttttatgtttttcgatcttatttatgtggatcaaaacgtatgtgatatataaactcggctttgatttgcaaatcgatactctgttggaggagctaatgctgctggtcaacccgctcagctttattcttcctttattcgggatcggcctgtttctaaaagaaaacaagcagcgggcctttttgctgatcgccaatttggttctgactgttatcttgatctctaatacgattttttacggcttttatatcgattttattaccatcccggttttatttcaggccagcaacatgagcgatatgggcagcagtgtaaaagaactgttccatcctctgtttatcgccctgtttgtggatttggtttttctgctgctgttcgccagaaaaaccaaacacccacagacaaaagccgctccccgcacgatcaaacggtactatgcagcttcctgcggcatgcttttatgcacactggcacttgcagaagtacagcagccgaagcttttggcacattcttttgaccgggaaatgctagtcaaaagcatcggtctgtttcagttccatatttacgatacaatttctcagactgttaatatcagcgcgaaagcttttgccgatgaagacagtataactgccattaaaaactacacagaggctgattacagcaagcctgatcaaagcaaattcggtcttgcaaaggggcgcaatgtcatctttgtaacacttgaatcgacccaaagctttgttctgaatgaaaaagtaaatggaaaagaaattaccccatttatgaatgatctcataaaaaaaagctattcctttgatcatttctatcagcaaacagaacaaggaaaaacatcagattcagaatttatcgtcgctaactcactgtatccttcccttagcggcgccgtctttttcacgaaaagcgaccatcaatttcatacgatgtataaatcgctgaaacagcacgattattattcagccgtctttcatgctaaccataaaacattttggaacagagatgtcatgtacgatacgtttggcattgaccgcttttttgatgttgatgattttcatgtcactcccgggacatcgacaagctggggcttaaaagacaaagaatttttagagcagtccgccgaaaagctgaaaagcctgccacagccgttctacagcagttttatcacgttaacgaatcattttccgtttgagattgatgaaaaggatcagctgatagatgaattcgattcaagcagtgatctgttaaaccgctatgtgaccacggttcgctatgaggatgaagcattgaggcattttatcaaaaaactgaaagacgaaggcttatacgaaaattcgatgatcgtatttatgggagatcattacggcatttctgaagcccataacgaggcaatggctgagtttttagggaaagacgaaatcacaccgtatgacaacgttcagctccagcgggtgccgtttatcatacatatcccgggaatcaccgatcaaaagccggaaaccatccctgatgccgggggacaggtcgacgtcaggccgacgctgatgcatttgctcggcgttgagacaaaaggcgatatccaattcggcaatgatttgctgtcgggcgaccgcaccccattcgccgttctgcgaaacggcagctttattacgaacgattatatatacacaaagaacacgtgctatagccaaaaaacaggtgaagtgctggaagatcaggatgcgtgcctcccttataaggagaaagcaaacgaagaactgtctttctctgataaaattttaaatggtgacctgctcaggttttccgaatgaaaaaaatccctctatcaagagggattttttacgtttccaatatcaccttgccagtcagcttcgtttcatagccgtttaattgagacaaattcgccttgtattcctcagaattcaaaatctccttcacggccttaagcagctgctcatgttttttcaaaacgacaatatcatattgttcgtcgatgagcgggataaaatcaacactgcccatatgtgccgcgtgctgtgccccgattcccgcgtcagcctgtccgcttgaaacttgtgaagcggcagcgtaatgatcggtcacgatatcgtcgtatccctttacatcagccggattcacaccaagcaagccaagctgttcatcaaggagcacccttgcgccagaacccttttccctgttgatgatccggatatcggctcttttcaagtctttccagccttgaatgtttttcggattccctttttgcacatacagtcctgctttccggagaacgacattgatgagacaaaacggttcacctgtcaagatccgtttcacataaggagcgttatactggcccgtttcagcatcgtacaaatggaggctgacaatgtcacacttgccttgatacatatcaatcaggctgtttaagcttcctttgtatttacggagcggcgtctcttgaatggcattctccaaatgcttgctgagaagatccatcgaaatgtcctgtccgctgatcatgacattcggtctgccgtccggctcagcctcctgcacctgtttcggtgcttctgttgcagcgatgggctgagacattctcatattcgttttatattgctttaaatcttcttcatccacacgcatctgccttccgacacgataagcaggcagcacgccttttttaatcaagtcataaacggtcagctttgataccttcagcagacctgcaacttcttctatcgtataggaagaggtttcattcatcatcatcactctcctattttattataccttttcgttgaatgtaaaaaaacccacataaaccaaacataatcagttataattagttatatctaatgataaggggtgcaatcatgtttaagaagtattctattttcatcgcagccttaaccgcttttctgcttgcagcaggctgttcttcaaaccagtcttcaacggacagcgagaaaaaagtaacgttaactatctcagctgccgccagcgcgcaggatgcacttgaggaaatccaaaaaaattatgaaaaagagcatcaaagtattaccatccaagataactatggctcatccggcgccttgcaaaaacagatttctcaaggagcaggagcagatctgttcttctcagctgctgaggataaatttaaaaagctggtggatgatggagatatcgcaaaaaaagacagcactgatttagtcggtaatgaaattgtgctggtcgtaccgaaaaacggagattcacctgtgacaagcttcagcaatctggctgaatcagaaaaaatcgctctcggcacgccggaatccgtaccggcaggagcttatgggaaagaatcactgacaaagctgtctctatgggacaaagtgaaggataaaattgtgtatggaaaagacgttcgccaagttctttcttatgttgaaactggcaatgtagacgcaggtattgtttataaaacagatgccctggtctcgaaaaaggtcaacattatcgacgaggcaaaagcagatacacacagcccaattatctatccgttaggaatcgtaaaagatacaaaacaccgtaaggaagcgaaggaattttacgaatacctgcaatctgatgaagcaatgaaagtatttgagaaatatggctttactgccaagtagcataagcgcttcagaatttttcacacccgttgtgctttcctttcaggtggcggcagttgccggaattgttgtcattattctcggaacacttgctggagcatggatgtcacgggcatcatttttcggaaaaacggcactcgaaacatgttttatgcttccgctcgttcttccgcctactgttgtcggttttattttgatcgtcattttcggaaagcacagcttcatcggacaagccatcgagtggattttccagcagcctgtcattttcacctggtgggccgctgtgatcgcctcggctgttgtagcctttccgcttatgtatcaatcagccaaaaccggatttgctgacattgatcccgatatacaaggtgcggcaatggtagacggcgctagcagatggaaagtgtttatccatatctccgtcccgcttgcctatccttcgttactgaccggaagcatcctcagccttgcgcgggcgctcggagaatttggcgcaacactcatgtttgcaggaaacatccccggtgttacgcaaacactgccgacggcgatatatgtcgcattggattccggcaacaatacccttgcttgggcgtgggtcgtctgtattgttgtcatttcctttttgatgctgtttttcattcaacagaaaaaaacgcactaaaaaaactccccataacagggagttttttgattaaaacagaagctcatcaggatttgggccgacacgctcatctttatttaatgcgtcaattttgtccatgtcttcttgagacaattcgaaatcaaaaatatcagcgttttcgatgatacggtgttctttaatggattttggaatggttacaacttcatgctgcagatcccagcgcaaaatcacttgagccacagatttattgtgtttttcagcaatctgtgtcagtacttcgttatccaaaagctgtccctgcatgagcggagaccacgcttccagctgaatgccttgcgctttgcagtaatctcttaattctttttgcgtcaagcgagggtgaaactcaacttggttcaccatcggtttgatttcagcatctttcaacagctcttctaaatgatgaacttggaagttgctgacgccgatcgcgcggattttgccgtctttgtacagcttttcaagcgcgcgccatgtatctttatatttatctttgccaggccagtggatcaaatataaatctaagtaatcaagctgcaatctttccagactcttttcaaaggcagcaagcgttgtttcgtagccttgatcttcattccacacttttgatgtgatgaagagctcttctcttgccacaccggattctttaatcccgatgccaacgccttcttcatttttgtagatcgctgctgtatcaatgctgcgatagccatttttaattgccgctttcactgattcagtcgcttcattaccattttctactttaaaaacacccagaccgaaccaaggcatttcaactccgttatgtaactttacagtatcttttaaacttgttggcacttgaacatccaccctttcactgaaatgtaagcgtctatattatctcacattcctctcagccgataccaataatacgcttaagaccctctttttgcttcttttttcacagcacaggcaaatccaaacactatttttttcctattttaacaatattgagattacaaatacattgagcagggtatgcgtgtagtgtaaccaaatgaaaacaaaggaggaaacaacttgaaacgtattcgtatcccaatgacacttgctcttggtgccgctttgacaattgcccctttgtcctttgcttccgctgaagaaaatcctgctccgaagatgtcgcagacaactgctgctggaacaactgccgctgatgtaggtttaaacgtcaatctggatgtacttggaattgccaaccagatcgctgatgccatcaaatccgcacagaacagggatgggtttgtgaaaaacctcatggagtcttccttctacgcatccggccaaaaatataatgtcatggtctttaatttaagccaggaatatgaagatcatttgaacggtgtgcaattttacggctcagccgtttacgacggcattacgtatggcatttgggtatttgaagatggaacctttacaaacaaaggcgatggcggctggatcaactgggccttcagaggctggttcgaccgggatggcagcactgtcgcatttcatcgcccttaatatagaaaaaagctggcgctctaacgccagcttttttgctgcatttattcgccgccttcaagcatggcggcttcgacatcattaatgtattggcgaagctcatgggagatgtcccgggaaatttctctttcctcgaaaagtgtttgaatttcatttctgatcgcctgtacagccttcagcttcacttccagcttctgattttcaaaatgggcgcttgatttcagctcatgatggctgtgctccagcctgaaaattaactgtttatagaatgtaatgacagataaaaacacttctttatgctcttccgtcttgtgtttttccagatattctatcgctgcttttgccgttttcactcttgttgcccgtatcaatcccgcttcatttaaaatcgacatctccggctttttatgttcaccgaagaaaatccaatacatcagcctcttgagccttgtttttgataatccgactttaaacgggttcgcatacaaaatttccaactcgttaaatcgttcttgcagcacatttgctgtttcttccgggatgtctccccgctccagcattttcatcagcgcctcttgctctgccttaaccccttgggcacggactttacgctcgtgctttttgatgcgattagacgatgtatattgctgaaaacgaagatttttcattttctcattgtattcagctatcaccgcaagcgaggccgttttgtttgtctcattcatgtcctctttaatcgtttgaagggctgttttgatcaatttgcgtctcgccgtcagcagcttcttgtttcgttcctcgtcctcttcttctttttcagtcagaatcggcagcacaacggtagcaatgacaagcgtgcataaaatgacgccggctgctaaaaagagaatcagatttctttccggaaacggcgtgccgtcctccaggaaatacggaatggaaaaagaacctgcaagcgttactgctccacgcacaccggaaatcgaaattaacagcgtcgaacgaagacccggtttatagatgttctgatctttattaaagaaccatttgccgttccagaagaacagcacccacaggaatctcaggagcattaacgtaaatgtgatgactaggatatagccgatcaccttcatgttgctgatggcagtgtcgttaaagataacagaaataacatcagggatttgcgtgccgagaataacgaagaccagaccgttcaaaataaataaaataatgttccacgtacttgaggagacaatttgcagcttgatcatcgttgattccagacgatcctgttcaaccgcatgggtaataccgccagccacaacagctaaaatgccggaaacgccgatttcttcagctgccaaataaatcacaaacggcgtcagaatttgaatcagcatatgcatcgtgacatcctgcatgccaaggcggcgcagaaataggcgaaaacgaataatcaaaaatgaaatgacaaccccgcacagcaagcctccgagagaaataaagacaaagctgacagccgcttgtgctaatgaaaatgcgccagtcactgccgctgcaatcgcaaacttaaaggccaccagacctgatgcgtcattcatcagcccctcaccttccagcaggcgaagaatcccttttggcattttcactcttcctgataatgcgctgacagcgacgacatcagtcggtgaaagaatggccgcaagtccaaaggccgctgccagcggaatagcaggaatcatccagtgaatcgtgtagccgcctacaatcacagtcgcaaatacaaggccgagtgcaagcaataaaatcggagcccttaaattccaaagctctgcccgcggtgtcctctttccatcattaaatagcagaggcgcgataaaaagaacaaaaaacaattcggtgtttaattcaaaatgaagtccctgtggaaatgaggcggcaagaatcccaagagccacttgaatcagcggcaccggaataaacggaataaaccggttcacgatattagaaatcgcaataatcgttaataatacgagcacaactaaaaatatgtccaaatgcatgacctccttcgtctgttgtgtgtcggcatgatgagccaaaaaatctgtttgtctaaaagcccttgagctagggtggccttgcatccgctatgtggttccgcaggagttctctccacacttgtcttcttttatagtaccctttttagggtattttttctcatgatatgctcacagtgaacttttttgcagcagagcaaattacagaaaaaagagacaggaagctactccctgtctctcgtctttctttctcaatcatgaaaattcgtaccgtcagttgttgctttgataatgcccgcgcggatgacaaagtcaccgaaatgctcgccttcctcacgttctttcgcatagcgggaaagaaggatgcgcagctcgcttaaaatgtctgcttcaccgatgttttcacggtacattttgcttaaacggcttccgtcaaacgcagcgccaagatacatattatatttgcccggcgcctttccgataaatccgatctcaccgagtgcatgacgtgcacagccgttcggacaccctgtcatgcgaatggtgatttcctgatcacgaaggccgttttcgtcaataatctcttcaatcttatctaacagggtcggcaaataacgttctgcttcggccattgccaatccgcaggtcggaagagcgacgcatgccatcgagctgcggcgaagtgctgaatagtgcttgccgtcagttagtccgtactgttcaattaaagcactgatttcttcttttttatcgcttgaaacgttcgcaatcattaagttctgattggctgtcagccggaactcacctgtatgaactttggcgatttcccgcaagccagtcatcagcttataatcatcgtaatccgttatacggccgccttcgacaaacagcgtgaaatgccatttatcctcgatgccttccacccagccatagcggtcgccgttatgatcgaaatgatacggcttcgcttcttccaggctccagccgagacggttttccaattcttcttttacgttttctaaaccgaggcggtcaactgtgtatttgaaccgcgcatttttacggacagaacggttgccgtaatcacgctgaatcgtaatcgttttttcagcaacgtcatacatttgctcaggccggcagaatccgatcaccttggctaattgcggatatgtcgcagtatcgccatgcgtcattcccataccgccgccgattgccacgttaaaaccgatcagcttgccatcctcgacaatcgcaatgaatccgagatcttgtgaaaagacgtcaatatcattagacggcggaacggcaataccgattttaaacttccgcggcagatagagcggtccgtacattggctcgacttcttcctccggcgtgccggcaactctttcctcatcaagccaaatttcatgatatgctctcgtccgcggcagcagatcatcacttaattttttagaccactcgtatacctctgagtggatttcagattgataagggtttgatgcacacatgacgttacggtttacgtctccgcaggctgcgatcgtatccaaaagtgctgagtggatcgtctgaatggttttcttcatgttccatttcagaatcccgtgcatttggaacgtttcacgtgtcgtcaattttaatgtgccgttcccgtatttctgggacaggtcatccatgacaagccattgttcaggcgtcgagacgcccccgggcatacgcacgcgcagcatgaactgatatgcgggctcaagcttctgcttttggcgttcatttcggaggtcgcggtcatcctgcaaataactgccgtggtgtttcatcaggcggttatcatcatccggaattcccgcactgattcgatcgagcatcacttctttcagcgtgccgcgcaaataatcactttcttttttaatgcgttcaacatcacttggagagccgtccggtgcttttagaattttggtcaccatgttgaaaaactcctttcaagtcaaatcaatatacatcacgctgatagcgtttttgctgctgcatatcggcaagataagcctccgcttcttcgcggctcatattgccttctttttcgataatttcaagcaatgtgttatggacgtcatgcgccatgtgcttttcatctccgcaaatgtaaacagccgctccttcttgaagccattcaaacaattctgcgctatgttcaagcatgcggtgctgcacatatactttttcttccgtatcacgtgagaacgccacatccatttttgtcagcacaccgtctttgagccaattctgccactctgtctggtaaaggaaatccgtgacaaagtgctgatcgccaaagaacatccatgcctttccttccgctcccgtctcctcacgctcctgcataaaggaacggaaaggtgcgacgcctgtcccagggcccaccatgataatcggtgtttcagggtctttcggaagcttaaagttttgattgtgctgtacataaaccggcagtgtgtctcccggctgcagacgttccgcgcacaaaatcgagcagacgccttttcgttcacggccgtgcgcatcgtagcggactgcgccgattgttaaatgcacttcatccggatttgcggataaactgcttgcaatcgaataaaggcgggcaggcatttttcgcaaaatcgagacaaactcctgcgcagatacactaaatgggccatagtcacggacgagatcaagcaaatcgcgcccttcaatataggcttttacattctcctcatttcccggggctaaaagctctctaagctcatcgttccctgtcagctgggctgcctgttcaagaagcggttttgtgagaacggtaatctcatagtgagaaatcagcgcttctttcagcggacggacatcaccttgcttattaagcgtcacaatttcttccgggtcccaattcatttccttaaggagcagctcgacaagttccggatcgttttctggatagacgccgaggctgtcaccaggctcgtaagtcaggcctgatccttcaagagacagctccacatggcgtgtttctttatttgatcctctgccgtttaaatttaaattttctaacacttcagcccgaaacgggtttgttctggaatacgaagactcaccggtttgtgacgcagccgccggcgcaggcgcggcggttccgcccccagcttcatttaatcccttcaatacaccctcaagccattcggctgccggttcatcatagtcaagatcgcaatcaacgcgcggagaaatccgttttccgccgagttcttctaagcgctgatcaaattctttccctgtctggcagaaaaattcgtacgaactgtcaccaagcgccaaaacggaaaagcgcaggtcttcaagcttaggcgcccgtcttccgtgcagaaattcatgaaacgacagcgcgttatcaggcggctcgccttctccatgcgtactgacgacgattaaaagattggttaccttcttcagctgattcggcttaaaatcgctcatggatgagacggtcacttgaaaaccgctctgttcaagctgcttgccggcattttccgcaagcccctgtgcgtttcccgtctgtgaaccataaagaacggtcacttcttttgaaacggccggtgcttccgcagacacagctgccgccggcgcacccgcagtttcttgggcggaaacagattgcgcggataagtatccgctcagccagattttctgggattcggtcaaggtcggcagaaggcggttaaggagctctgcctgctcctgattaaacggactgttcattacctgaagttgcaacgtatccacctcacaaagttataaactgatcgaaaattgcatctaattgaactttaccggaatactaggcttaagtaaaatatatttacatgatgataactattaagaatcctaatgataaaacggctatgcttcatgtaaatagaaaaaagagaaggactcccttctcttcattcagccatctgatataagtgaggcggcacagcggttacaaacggactggcttcacctgtataaaatactgccagcatgtgcatcgcacgggtgcacgcagtatataaaagcctgcggtcgtgctctgtatgatagtgttcttcagatgcatcatagacaagcactgcgtcaaattcaattcccttcgctaaatacaccggaatcacgcaaacacccttttgaaatggttgattttctttatgaatcaggcgaacatctgtatattcactcatgtgggcgtgcgcctgtatgcattgctgcgcagtcttgcagatgacggctattgtttcgcgcccttttttcttgagccggccaatttcttgcgcgagcttttggcaaaggctctcatgtccttcagttttgacaacgagcggcatttccccgcttctattaaacggctcaatatccgctccatattgaagcatcgctttggtaaactcgacaatctgccttgttgatctgtatgttctctttaaacgaacatactcagcaggctcatcctcaaagcacgcatccatacgctgatccccgtgtatggtatgcgcgtagatggactgattgatatcaccgagcactgtcatgctggcagccggaaaaatgcttctcatgtaaaccatctgaaacggtgaatagtcctgagcttcgtcaataaatagatgtttgatcttcgtatttttctttctgccctcaatcagatcctgcatataaagaaacggtgctgcgtcctcatagagcaatttattatccgtaaatgccgaactggtcagctcacctatcgcgtccatcttctcatgctgaaattttcctccccagccagaaaacaattgcaaataaagttgtgtaacatcaagaaatgcaaggagtctgaccgcctgtttgagcggtttgaaagcttttttcacaatgatggcggcaagcagctgctgctctctttgataatcgttaaacgtactctcgctgaaccgtttcctttcttgcagttttctgtacacgtccaagtagtcctctttgtcaagcagctcagcttcatgaacaacccaatcctttcgccgttcctttttctcaagcttgttaagctcactcagcagccacttcgcggtttgctccatccgattcggaatggagtgattttgatccaatgagtaaaaataggattgaatttgctcctttgtgatcagcttttgtccgcggaatataatatttttaaaaatcatcccttcagaggaaagccgtgtgacgtattcattaatgaattgctgaaaggataaacccgccttccatgtgattcccgcaagccttgttggaaaatcgccttccttagtttcggtcaggcaatattcgagctgatcaaaggcgctttcacatttgaacttgcggccaagacgatgctcgatatattcctgaaacgtcgcctgctccatattctcttctcctaactcaggcaaaacagaggatacatagctgttaaataagaagttgggagaaaacaaaacgatttgtccggcatcaatgacgccgcggtgcctgtataacaaataagcgacacgctgaagcgcagccgatgttttcccgctgccagccgctccctgcacgatcaggatcttgcttttttcattacggataatctgattttgttctttctgaatcgtagacacgatgtttttcatttgggtatcggagtgatggcttaatacctcttgcagcatttcatcgccaatcgtcatatcggtattaaacatcgccttgagagtgccgtttttgatcataaactggcgtttcagcaccatttccccttctatcgtttcaccgggcacctcgtactccgcttttcctggagaataattgtagtacaaacttgatatcggcgccctccagtcatagatcagaaagtgttcctctttctcatccaaacaggaagctaaaccgatataaattcgctctgcctccgcctcgccgttttcaataaaatcaatccggccgaaataaggcgattttttcaattgatgaattcgtttgagctgctgatccatgcgccgatgattctgttcccgatcagacagcagctctgcctgctgcttaatgcttgccatcgtttcaatcgcttcatgggcatcatcaaaattaaccttaacatcctcccaaaagctttttcttaatccgatgatatcatgcttcaacccgcccgcagacgtttccagaaaccgctcttttttttcgagctccttcagcacctcatctattctcgactgctcttccttccattccttatcctgctgattcatgaacggcacctccagaaaatagttgacaaacatagatgaaatactgtaaaatataattggatacatatattaaatatatgatgtaaactggcaaatacaatttataatagcacattcacccaataccaatcaaggtttgggttatttatatgcagaaaaaaccgatttcaactcgaaatcggttttttctcttatgatttcacattgatcactgttggacgtgcttttcttaggttgcgaatcttctctttcatcagtatcgattccttattcctttcaatcttcgatataatatatctttttcattttaaaaacaccgcagagctttaccgtatttgtctgttcatctaacgtgaagaatgactaaactggctgttattgtcatcttccataaagcaactacatctctgctatcgtatctatagtcgcagtaaaatagtcatttttcacccattttcgacacatttcaacaaattaaagtttttcatttgggagaataggacgatgttacattatttctctcggtttatgatatgaacatgaagaaagaaccagaattagttaggaggaaatactcagtgaagaaaaagctatctatgttgttgctggcattcgtcgtagccgtaacaagttttacgtcaattgacctagtaaacaacaaagcggaagctaaagattgggttaaaaaaggtcaaatatggagtactcattaccattcgggctcatttaaaaactatacttactcgccaacttttcatatttattatccaggacgaggaacttgggccaacatgacatcaaatggatcaggcagcgggaaaattacagcaactctgcaacaaaagacaaataaaggctggaaaaatgttaaaactttttacgcaacgaaaaaaggctctacaaatttaagttacaaacaagcttctaaaagctacaaaacaaaatacagattcaaattcactaacacaggaactaaaaaaaccatcagctataccttttgggctacctattaatttcaaatagctttgctctgcgcggtcagcattcgaaaaggactttttatttgatcccggcaggctaccataaaagaaacctctccgtcatggagaggtttcttttattttactgactatctaagcgaaaagaacggtttggcagcttccaattaaacatataggaacaaacccggcaaacaacgagcacgaaaaacagaacgtataagccgaacgagttccccatccagcccaagccgacgattaaaccgccgagagccgcccagactgcataaatttctgccttcagcacaagcggtttgcgaccggcaagaaggtcgcggatgattccgcccccgcttcccgtcagcaccgcagccacgatcacggcactaagcggatggcccattttgacagcatacagtgcgccttggatagcaaaggcagcgaggccgatcgcatctgataaattgccccacttattccaatgcttcagcagcagcttcggaaacagaaacacaattgtaatagataaaagcgcgatttgaaagtacgctccctgctcccatagcgctgacaccggaacaccgatcagcaaattgcggatcgctcctcctccaaaagctgtgacaatccctaatatataaactcctaaaatatcatattcctcttccatcgcaacaattgcgccgctgactgcaaacgcaatgatgccaatcacactaagcagctcccaagccattctgatgactcccttttatgtttgttaaattttctgacgacctctagattttataatcgctccagcgtaaaatcaataacatttttatgagaaaaaaagataaatttagagggaatacggctattgctgatggacatgagtttgcgaaattaaaaaagcgcccggcatacgcgggcgctttttttgttattcagatttttcgcctttcagcaggcacataaaaatgataatcaggataaaagcaatcagggccaggaatggaatcgtaataaaaccaaaccagttaatatattggcccgagcacggcacgccgcttacacacggcttaatgccgctaaaaccgggcactttttgttctaagtaatgcatggttgaaatgaatgcccctataatcgccatcgggagcacatattttttcactcgtgtgtccccttgaaaggtggcgatgcctaaaatcagaacgagcggatacatgaggatacgctggtaccagcacagttcacatggaataaactttctgatttcactgaaatacaggctgcccagcatagcgataagagccacaacccaggaagcatataaaaatacgattctatttttcatatcgttacttccctttcagctctttttctattgtctctttgatttcatcataatccgcaaaatttttgatcactttatcattgacgtaaattgtcggtgttgcctgtatgttcattttttgattaaggtcagaatccttttccacttgagaagcgaatgtttccttatcaagattttccttgagcgtctcaggttttatctttgtggtgctttttgcaagatcaccaaggaggcctggggttacccattcctgttccgtatccggctgtttttcgaacagcttttcatggaaatcccagaaagagtcagggtcttccttccatacttcttcagatgcaagagccgctaatcttgaaccttttccatggaacatgacgttcacgaaagaaaatttcacatcgcccttatcaataaagtctttttgtatttttggaaagatgtcactgttaaacaccttgcaagacggacatttgtaatctccgaattctactacagttaccggtgcatcgtccttgccaagcacaggctgccctttgatagacggctgtccggaaaccgcatcattgccttgttccgttttgttattaatgatgacaatggctgctagcaatacaacaaccacaaccgtaaggatgaccgcgaatttcgcagaagactgctgtttctttttcactccgacacctcatcgttttaaaattaaaaaagaagcggatcgcaattgatccacttctttattttaacaagacaagcgccgataagaaaaccccgaaaaaatgaattctctccgacaatttatttgtttttgagacgcatgacgcgcatagcgtttgccacagcgagcagtgtaacaccgacatctgagaaaaccgcttcccacatggttgcaattccaaatgctccaagaatgagaaagatcgctttcacacctaaagcaaagccgatgttttgccacacgattcgccgtgtccgtttcgcaatccgaatcgcttctgctatttttgacggctgatctgtcatcagcacgatgtctgcggcttctaccgcggcgtctgacccaaggcctcccatcgcaacccctatatctgcgcgtgcaagcaccggcgtatcattgatgccgtcaccgacaaaaatgagtttttcactaggcaaaagcttagcttctaatgcttcgacctgcgccactttatcttgcggcagcagctctgcatatacctcaccaatcccaagctgttttccgacggcttctcccgtttgtttcgaatcacccgtcagcatagctgtctgtttgatcccaagcgactttagatcagcaaccgcctgtgctgcgtcttcctttacttcatccgctatgatgattgctccggcatagcgttgatcaacagcaacgtgtacgattgttccagcattttcatccgggacatcctcaatttgttctctttccatgagctttttattcccggcaaggatctcagttccatttacctttgcaaaaatgccgtggccggggatttcttcgtatgactctatctcatcggaggaaagcattttcccgtaagctttacgcacagattcagcaatcggatgctgtgaatgaagctcagcgtatgccgccgcttcaagtaatctatcctttgtaaaaccttccgcgggtttgatttctgtcacttcaaagctgccttttgttagtgttcccgttttatcaaacaccgcgtatttgacttgattcaaagcttctaaataattgcttccctttacaagcactccggcctttgaggccgctccgattccgccgaagaaaccgagcggaatggagacaacaagcgcacaaggacaagaaatcactaaaaagataagcgcgcggtacacccaatcggaaagcgcggcgccagaaagaacaagcggcggaacaaaggccagcaataccgcgatgatcacaacagcaggtgtataatacttggcaaacttcgtgataaagttttctgtccgggctttacggctgctcgcattctgaaccaagtctaatatttttgatactgctgattcttgatagccctttgtgacttcaatatgcagaacgccgttttgattgataaagcctgacattacatcttgtcctaccgcagcttttctcggaacggactcacctgttaaagcagatgtatcaaccatcgctgacccttgcacgaccttaccgtccaggggtatgctttctcccggattaaccacaatgatgtctcctgtctgaacgtcctccggggaaacctgttcgatgctgttctttgttttgagattggcgtaatcaggccgtatgtccattaacacactaattgattttctggaacggctgaccgcggcaccttgaaaaagctcaccgatttgataaaacagcataacggcgacgccctcagggtattgctgaatcagaaaggcgccgattgtggcaagagccattaagaaatgctcatcaaacacctgaccgcggatgatgtttttgactgcgcggatcataatgtcaccgccgatgatcaaataagcagcgaggaaaaggaaaagttcaatggttcccgaatgaaccaaatatgccgctgcgccgagaatgacagccgccgccattctgatcagcatattgaccattctattacgatagccatcatcagctgatttctttttatgcttttggcgaaccgttacatgcggatcaattgatttcacttttttctctactttattcgtgacccattgctcttctttcccatcggctgagacagttaaggtgcttgccgcaaaatttaccgcgcatccgtcaatgccttttatgcctttgactccattttcgattttttgggcacaattgctgcaatccaaaccgtccagaacgtattcctgtttcactagtctcaccttaccttccgatttagggttcccacttcaaagcgtatcaatgagtattgcattctttataatatatatgagcatatactcatataatagttacacctattatatgttgttttccaagaaagtgtcaatgaaaaacaaaaaccggcatatagccggtttttcattttactttttgcagacgaagagcattcagaacaacggaaacggagctgaatgccattgctgctcctgctatccacggtgctaaaaatccaagtgctgcgattgggatgccgaggctgttatagccaagcgcccagaataagttttgtttaatgtttttcattgtcaatctgctcatgcggattgcgtcggcaatgctgttcagatcgccgcgaataagtgtaatgtctgctgtttccatggcaatgtccgttccagttccaatcgccatgccgatgtcagctgtggcaagcgccggcgcatcgttaattccgtcgcctaccattgccgtctggcggccttctttttgtaggcgggcgatttctgctgccttttgttcaggaaggacttccgcaatgatattcgtaattcccgcttccttcgcaatggcttctgcagttctgcgattgtctcctgtcatcatgatgacatcaaggcccaattctttcagacgggcaacagccttccgcgacgtgtccttaatcgtatctgcaaccgctactagcccagctgcttctccatcaatggatacaagcataactgtttttccttctgcctctagctcttccattttggcgagaagagccccatgctcaacctgtttgctctccattaattttcttgtgccgacgaggatgctttttcctccagcttcagccaaaatgcctgcgccgacttttgcttcaaagcgggtaagcttcggtatctcaagccctttatctttcacgccagcaataatcgcttcgccaagcggatgctctgatcccgtttccgctgccgctgcaaattgaagcaaatctttttcttcaaaatggccgaatggaatggcatctgtcagacgcggcttcccgtttgtcacggttccggttttatcaagaacaattgtatcgagacgatgtgttttttctaaatgctcgccgcctttaaataaaatcccgaattcagcagcgcgtccagatccagccattatgctcgtcggagtggcaagaccgagggcgcaaggacaggcaatgacaagaaccgcaatgaacttgctgatcgcttcggcaaaatcgccaggagccgcccaaagataccaaatgagaaaagtgagaacggcaatccccaatacaatgggaacaaaaatacctgaaatctggtcagcgagacgctggatcggcgcttttgacccttgtgcttcctcaacaattttgatgatatgagaaagcgcagtatcctttccgacgttgacagctttaattttcagaaagccgtttgcgttaacggttgaacctgtcacgctgtcaccaggatttttgtcaacaggaagactttctcctgtaatcatcgattcgtcaaccgctgagcggccttcaaccacttctccgtcgacaggaattcgttcgccaggtttgacgtaaacaatgtcattaacaagcacttcgtcgatcgggatgatttgctcctgtccgtctcttacaacagtagctgttttcgcttgaagcttcatcagctttttaatcgcatccgaggaacggccttttgcttttgtttcaaacaacttgcctaataaaatcagcgtcagcaaaatcgcgcttgtttcatagtaaaggccgtctgtatgcccgtgagagccaaggctttgaaaagtaagataaagactataagcgtaagcagccgtcgtaccgagggcgaccaatacatccatattggcgcttttatttctgagcgccttatatgcacccacataaaacggccagccgatcagaaattggactggtgtcgccagcgcaaattgcatccacggattgagaaatatatccggtacccaaatgaatgatgtaaatgtaaaatggctcaccatcgcccaaagcaatggaaatgacaggacagctgaaaaaatcagtctcgccgtttgcttcctttcttctttctttttagcagcagcagcctcactgtcctgttcacccttcaactttagcttatatccaagcttatttaccgcttctttcaaatcgctgacagacgcttctttcggattgtattcgaccgtaactgtttctaaagcgaagtttactggagcatttgcgacgccttctattttgttaagccgtttttcaatccgattggagcaagccgcacaggtcatgccttcaatatcgaattcagctttttctgtaacgacgtgatagcccagcttttctattttttcttgaatcgctgcagtccctgtttcagcaggatcgtagattacatttgatgtttccgtcgccagattaacatttgcatccgtgacaccgggcatccgcttcagtcctttttcaattctggcagcacatgccgcacaggtcataccagagacctgcatcgcgatttccttttgttcactcaacatactcactcctttatatacacctggggggtatataaaaatgaaagaaatatcgcgcctccctataggcgcgataccttgaatcactcagctacgtcatagccctgatcttctatcgcatccgcaatatctttgactgatactttgtcagcatcaaacgaaacatcgactttacccgcttccagattgacatgaacggcactgacgccgtccagttctcctacgcttgtttctactgctttgacgcagtgctgacaagacattccttcaacttgcaatgttttttgttccataatcaattcctcctgtttattctttctattttcatcctaccatacccctgtagggtattacaataaaaaaacgctttatgattttgtgaactttttaaatacgtccaaaagctcagaaatggcctgttccccgtctccgcttttgatggcatctgctacacaatgatgggcatgatcctcaagcaaatgaagcgccacatttttcattgccgcctgaacagctgaaatttgcacaagaatatctacacaatatctgtcgttttccaccatgttttgaatgcctctgacctggccctcaatccgcttaagccggtttgtaatctgatccttttctttcgagcttttatggtttaatgttttatgttcgttatgcttttccatgcgtacacctctgtttaatgatattaattcccattatactgattgtccaaacggttgtctaagcatgccgatccaaaaaatgaatcagttaggttttaccatttgatcaggagggtatatacttctgttgataacgcttttaaaggggagaagaaaagtggacacgatcaaggttggaatattaggatacggattgtccggttctgtttttcacgggccgctgctggatgttctggatgaatatcaaatcagcaaaatcatgacatctcggacagaagaagtgaaacgggactttccagatgctgaggttgtacatgagcttgaggaaatcacaaatgaccctgccattgagcttgtcattgtcaccaccccgagcggccttcattacgagcatgctatggcatgcatacaggccggaaaacatgttgtgatggaaaaaccaatgacagcaacggccgaagagggggaaacattaaaaagggctgccgatgaaaaaggcgtattattaagcgtatatcataaccgacgctgggataacgactttttaacgattaaaaagctgatctctgagggatctcttgaagatatcaatacatatcaagtttcctatgaccgctacagacctgaagttcaagcgcggtggcgggaaaaagaaggcactgccactggtacgctgtatgatctcggctcccacatcatagaccaaaccctgcatttgtttgggatgcctaaagccgtgactgcaaacgtgatggcccagcgggaaaatgctgaaacggttgactattttcatttaaccctggactatggcaagcttcaagccattctatacggaggatcaatcgttccggcaaacggacctcgttatcaaatccatggaaaagattccagctttatcaaatatggaattgacggacaggaagacgcactcagagcgggaagaaaaccagaggatgacagctggggtgcggatgatccggagttttacggacagcttacaaccattcgtggctccgacaaaaaaacagaaacgatcccatcagtaaatggctcctaccttacttattaccgcaaaatagcggaaagcatacgggaaggtgctgcgctgccagtcactgctgaggaaggtattaatgtcatccgcatcattgaagccgcgatgaaaagcagtaaagagaaacgaaccattatgctggagcaataaaacaaaagcctccccaagtaaggggaggctttttcattagaatgtttttcctgcttctttcgcacgcgcaatcgcgtcttctttgatttgctgtgctttatcaggctccgcattatgtccctctacgaaaatgccatcgaaggatggtacgccgaaaaaattcatcatgatgccgatgtagcggtgtcccatttccatctcagccgcagggccttctgaatagtagccgccgcgcgcttggatatgaattgcttttttatcagttaacaagccgacaggaccttgttctgtgtatttgaatgattttcctgcaacagcaacagaatcgagatacgctttcatcactggcgggaatgagaagttccataaaggagtaacaaatacgtacttatcagctgatgcaaattgatcgctaagctctcccaaacggcctactttcgctttttcgctttcagaaagctcttcaaagcctgtacctgactgaagctttccccatccgctaaatacatctgcgtcaatgtgcgggatgttttctttgtacaaatcgatatgtacaacttcatcatttggattcgcttctttgtaagattcgataaatgctttacctgttgccatactgtacgaagttgcttcgtcatgcggatgagcagtgatatataatacttttgccatttttaccagccctttcgtttttaaaaatcacacatcaattattatcatacagatgcataatgattattctgtctctcttagactttattataaagacaaagaaatttactttcaagtaaaatatctcgaattaaagattatttaactttcccaaacagcttacttttcaaaagctgttctcaagccggaatacagcgcggacagttctttactgattcgaggataatgagggacatgcggcacttgaatatccgcaggcatccttttcactataaaggattgctcagccttttcaaaaaacgcccccagctggttgatctcttcatcagaaaacggagcaggcggacggcggtgagcttgggccgaaagcaaatagtaccctaagtgctgagcaccggaaatggcaggccagagcgcatccgcattcgcgtgaggaaactcgccaagcgccttgtcatacgcatcccgaagcctgacaagactcacccttaacttgtgttcgtcggcaatttgcccggttaacagtttctccataaactgcccttccagccggatgacattccgcacaagttctggcagccgcttggttgaaaaccgccgccacaaaagcattgttcccaacagcccgatcacgctgccgacagctacatcagtcagcctcgctatcataaaataaccggcacccgcgccgccatgcatactttctgtgataacaagcgcatttgcggttaaaaagggaacagccagcgcataattgcggacgatcagcatctcaagaagacattgcagcgctgcaatacaaaacgcaatataaacaccgcccagcttaaaaaacaggattgcacctgccagcataacaccgatcaccgttccggccgaacgctgaatagccctgtgaagcgtaaaaacaacagtagtgccaagcatgaccgctgctgccgaaagcggaatccaataggagcgtgcaaagccgaatgcgagggcaaacatatcggcggcaaacagaacaattccgtactttaacgctctaatcaaaactggagacttccagtcaaaagcatttctcaaaaagtaaaaagaggatggcaggcggcttggttccccgtcaagctgcttatcaaaacgtcctgaagcgatatgcaaaacctcattgatttcttcaaacagcttccgcctaggctcagattcgttctcattaatctgaaacgtaccgaaaacccgtgcatgcgcaagcatatctccggtttggcgaagtgccttttcaatctgcgcggtctctctgtccggcgtttcagctgaaaaatgaataatggcaatgaatatgtcgtcagctttttcaagcaggcggaaaaaccgttcatcatgccgcgattttttccgtttattccctttcccaagaaccgtttgtcgggctgttctaagcatgagcaccgtctgatgctgtgcgttatgaaaacctggcgttccgacggctgaaagacatgcagccagctgatgatatgttttttgcagcaccgctccctccggtccatgtttgttccataaccagccgattaaagcgatacccatggcgaaaatgccgccgagaaacgtcagtcccgctctgaacagcgcttgtgaaggatcggccggcagcccggaactgactaaaaaggcaaggacaaaaaacatcggcgcagggccttgaatgccgagcgcgctaaaaataaacatcgccgctgcaccgatcagccccaaaacagccgccatcatccaaagcatcccggacaaaagtgtccctaaaccaaatgagagggcgatcccaatagaaaccaagagcagcttcaaggcgcgctttttgtacgattcaccgcccgcatataaataaacaaagcctccgatacttgcaattaatccgtaatccgtgtgacctgccaatgcaccgaccagcacaggaaaccctgaagcgaaacctgatccgatagcctttttccaaggaaatggatttgcatgaatgcgaaaggcatccttcacgataggcatgattctttgattgttcgcagcagttttgttcatttgacaaaatccttttcaatgaatgtgtagaacttttcccgtttcttcgctttagtatgcccaaaaacgcggttagcttctcaattggtgcgcccgataaaaaaacagagacttataccgtctctgcttcattacatcagtttattataaaagcggcacctgtcaggactgttttgtccttctgccttccttcaagagcaggtgaataaaaaataaaggataaatcaatagatacccattaaacagccaccacacaagatcaaagtcactgctgaatgtccagaatgatagcgcctgcagacctgaacaacaggtcagcacaagagaaatcagcgccatcagcttccagtcagctcgattcacccgctgtaggtacaagctgtacaaccctgtgacagaaatcaggatatccagcggaaaaaaagaccagttccaagcgatcataaacggatggtcatgatgtttaaaagcccagctttccggtatgagagaaaacccggctgacagccagtacaagataaaaccgatatcagtcacgagaaaaaacagcttcatatatctcatttgtactgcccgcttttatgtaccggctcagacaccgcagcatgctcgatcaggtttaaagacacaacaccggcaataatcaaaccaattgaaatgactttcatgacactaacatgttcttgaaaaaacaaaaaaccaatgactgtaatcaggacgattcccatccctgaccatacagcataagcaacagatacatctattgattttagcgtaagcgtcagaaagaaaagactccctccataaaagaaaatcaacagcaaactgggaataagctttgtaaaaccagacgatagcttcatgctgaccgttcccgcaacttcaaacaaaatcgccaagcatagaaacacccaattcatgtcgcatcagcctcctcatcagctgttataccgttaaacaaaacatctacaattgattcaagcacctctcctgtcatgaactgatgtttcagcggatattcagggtcatacacttgattgatgctccctatatacatgtgaacaaacaggtccggattgatgtttctaattctcttttgctgtttgcactcgtctaataattctaggacaatggcccattctgccttaataaacgtgtctaatgtaagccacgcatcgtaatggtatttctttagttcatttaataatcccatgttcagcagttccatcccctgcggaaggctgatcagcatttttttcaccttttcaagcacatttaaactttcattttcatagatgtctctttctatttgcttcatttcagctataaattgttcgacaaccgcctcaacaagctgatctttagatgaataatatgcatagagagtccgcttgctcgttcccagcgctgccgccaaatcattcatcgtaaatgaaaatcctttctgcttgatcagccggaaggtttccgccagaattcttttatccatattaatcccccgctttcggtaccaagaaaactatttcggtaccaatattatacggcagaaatttatggaaagcaacaatatataaaaaaacctctcctattgggagaggtttaaaagacactgcggaccaaaccgccgtccgcccgaagtgccgcgccattgatcgcagaggaaagcggactgcttaaaaatgtaacaaagtgggcgatttcttccggacggatcagtctttgaataatagatgtcggccggttttctttcataaaacgtgcctcagcttcttgaacagtcaggttttcaccaggatacagcgagttcagcatggtttccacaccctctgttaaggtagagcccggcatgacggtgttgactgtgacattcgtgccggttgccagctccgccaaactgcgggaaatggacagctgcatcgtttttgtcgcactgtaatgcgccatttcctgtgacggcataatcgccgcttcactggcaatgaaaatcacacgcccttcctttttctctatcatgttatgcaaatacctgcgtgtcagccttacaccgctcataatattcacttcaaaaaaacgaaaccattcatcgtcgggaatatcaaaatactccgccggttcaaaaatccctaaattgttgaccaaaatatcaacctctggatatgcctgaaacagctcattgcagccttcttctgttcccaaatcaaatgcagccggataaagaaccgcttcagcatgttgtgttttcagttcatctatcgtctgattcactttctcttcccggcgtccgttaatgatcactgccgcaccttcttcagctaacgaagaggcaatagcttttccgatcccagatgtcgaaccggtcaccagtgcggtttttccttgtaaattcagcttcattattcatccctccgtttttgattcctcttatttattgacagaaatctgattggtgaaacatctgctctgcaatcagtatgaaacagctgggattgaaatggaagtacgcactttttggtgcctgtggtttggagaaaaaataaagcagaaccctctaagaggttctgctttattgtcagtatgtatggagacggtgggagtcgaacccacgtccagaaacatcgattacttaagcgtctacgagcgtagcctgcatatttatggtttcactcatcttcttgcctgcgggcgggccttccgagagctagtctgttcatctcttcttacgttctcagacaggaacgcaagcgtagcctacttggatgtgctcttcacagacacataggcaatgtcaggaagagctcgctgcgcttattaggcagctaatgctacgttttggttaaaactgttagttttgccagttatatttaagtgcgtttttacgagatcgcctctcggctcgcagctcaagctcgatccatccctgtcgaatccgtaacgtccccttggtataagggaaatacgggagaaaatatcaagctctcactcaaactggctatagtcttattataacatgatcacggctcttttcaattgtcaaatccttcaaatgaatggcgtcgtgatctgatcgtgaacacagtatagcacaggcctgattttcgaatcaagcactatgcctttagaagcctttttgactgtctctgaacgctctttcgatttcccgcttcgcgtccttgcgcttcaggtcttcccgtttgtcatagttcttcttcccttttccaaggccgagaagcactttcgcaaagccgttttttaaatacagcttcagcggaacgagagaatagcctttttcctttgttaacccgatcagcttattaatctccttgcggtgcattaacagctttcttgtccggagcggatcgtggttatagcggtttccctgctcatatgggctgacgtgcatattgtggagaaacacttctccccgttcgattttggcgaaggaatctttaaggtttacgcggccggcgcgaatcgatttgatttcggttccttgcagaacgatgcctgtttcataggtttcttctataaaataatcgtggttggctttcttattttgagataatacttttcctgacccttttggcatgccagaacctcctctctctaaggaaaaactgtccaccttttgcgatacgctctattttaccaaatgtcacgtaccgctacaatgaaaagctgtttccgaaagaaagcaaatagagcgctgcggccctatttgctggttgagctgctatttcttctttttccgtttctgtttcggagcattctggaagccgcgttttttctttttcttcttcggcttagtgaaccactcccctttttcctcagacggagctggagaaacaggtgtattggtgctttgaacacgttttctggcaggctttccgcgttttctgctccggctgctgtccaattctctcggacgccgcggagtgcccttcatgccgacaatttcaaagtcgatattgcgctcatctttattgacatcgacaaccttgactgtgatttcatccccgatgcggaagacgttgcctgtccgctcgccaatcattgcgaaatgctgttcgtcaaagcggtagtagtcatctgtcataaagctgacatggacgagtccttcaattgtattcggcagctcgacgaacattccgaagtttgtcacagagctgatcatgccgtcaaactcttcaccgattttatcaagcatgtattccgcttttttcaggtcatccgtctcacgctcggcgtcaactgcacggcgctccatagatgatgtatgttcggcgatatccggcaggcgttcagcccacttttcctgtgtcgcttcatcgactttgccgttgatcaaatacgttcggatcagacggtgaacgattaagtccgggtaacggcggatcggcgatgtgaaatgcgtatagaattccgttgacagaccgaagtgccccaagctttgcgggtcgtatttcgcctgtttcatcgaacggagcataacagtagatataaccgtttcctctggtctgtcacgtacagcgtccagaatgctttgcagcgcgcgcggatgaatattccccgccgttcctttcaccacatagccaaatgtcgtcacaaattctaaaaacttttgcagcttttcagcattcggctcttcgtgaatccggtatataaacgggacgttcatccaatggaaatgctccgccactgtttcgtttgccacaagcataaattcttcaatcagcttctcggcgacagagcgttctctgatcacaacgtctttaaccgctccttcgtcatcaacaagcacctttgcttctttgaaatcaaagtcaacggcgccgcggtccatccgcttatcgcgaagaatttgagccaggcgctccatgtctttgaacatcggaacaagaggctcgtatttttgcttcagctcttcatcatcatcaacaagaattttattcacatctgaatatgtcattctttccgttgttttgatgacactttggaagatctcgtgctctgtcacctgtccctgactgttaattgtcatttcacaagaaagcgtcaggcggtcaacctttggatttaaggagcagatgccgtttgacaatctgtgcggaatcatcgggatgacacggtcaaccagatacacacttgtccctctttcaagcgcttctttgtcaatcggcgagttttcggttacgtaatggctgacatcagctatgtgaacgccaagcttgtagcttccatcatcaagtttcgtcacggtaactgcatcatccaaatccttcgcatccgcaccatcaatggtgacaatcacctggtcacggagatcacggcggtctttcagatctttttcatcaatcgtgtcaggcgtacttgatgcctgttccatcgcgtcagctggaaattctcccggcaggccgtgcttatgaatgaccgataaaatatcaatgcctgggtcgtttttgtggccgagaatggtttcaacctcaccctctgcgttcatgcggccttcaggatagctcgtcagcttgacaacaaccttatgcccttccgcagctccatttttcccatttttcggaatgaagatgtcactcgtgatttttttgtcgtccggaatgacaaagccgaagtttctcgtttctgtatacgtgccgacaacccgctgaatcgctctttctaaaatccgtatgacggttccttcctgcctggagccgcttgactgtgaatttagacgcaccatgacgatatcgccgttcattgccgtatttagctcattaggcggaataaacacatcacttaacgacgtatcctcaggcagcaaaaaggcgaatcctttcgcatgggctgaaatctttccttttattaagttcatcttctccggaatgccgtagcggtcgcttctcgtccgtacgataagccctttttcttccaaggcgactaacgctttgacgagctctttaaactcctcggcttccgtaatatttaacatctcctcaagttcctgaacggtcagaggtttgtacgcctcttccttcataaacgagagaagcttttccataaatgcttctttttccattatccgacctcctgttgattaccaatcgagcttctctaaaaattcatacacatcctgatggacgaggtcacgttctttgtcgagtgtaatgacatgccctgattcctcgtaccatttcagctgtttatcatcagtttccacttcgttgtaaataatattggcgctttcggtattaatcatgtggtcatgacgggcctgcaccacaaatgtcggtgaataaatcatatcgacattattccgcacatcagcaattaagtcttgtagcgccttgagggtattcatcggcgttttttcgaattctttcatttcctcttcaatttgctccgggcttttcccctcaaactttttgtaattgcgagcgtatgaaagaacgccttgatacatgacctcttcactcttaatatgcatcggtgcgcacattgggacaattccctttatgggtacagtgtaacccaatttcagcgaaaaaaccccgccaagcgacagtccgcaggcagcaatgctctcatagccttcagattttaagtattcatagccatccattacgtttttccaccagtcttcgggccccgtatgtacaagttcttcaggcgggacgccatgtccttcatattgaggcgcgtggcacgtatagccgcgttcattcaaatatcgtcccagcatccttacatccgctgtattgcctgtaaagccgtgcagcaaaagcaccgctttgtctccgcctttaaatgtaaatggttttggtgtcacaactttcatgctcatgtctccctttctatctgcacgatcattttagttttccacagtttaatcagaaaaaaacgttttgaatatcatccagaaacgtgaaaaaggcctgacttcacatcagaccttatacaaacattgccctataggatataagcaagcgcaatcgttaacacgaaaaacaagactgccagcactaccgtaatgcggtgcaaaattaaatcaagacctcttgctttttgtttcccgaagagctgctccgctccgcctgaaatcgcaccagataatccggcgcttttactggattgaagcaaaacgacaataataagtgcaatgctgacgataaccaataaggtaatcaaaactgcgtgcatcccatacacctccagactcactggctacattacttctattttacatgaaaagggttggcatgtcacgctgtatcagacgccaaaaggccggataagacgttttatcttggttaccctattcatatgaaaaggacaaaggagaaaagcgatgccgcttatcagcatagacagcaggaaacatcttttttatgaagaatatggacagggaatccctatcatttttatccacccgccgggcatgggacgcaaggttttttattatcagcgccttctatccaagcatttcagggtgatttttcccgatttaagcggccacggtgatagtgatcatatcgatcagccagcgtctatttcctattacgcaaacgagatcgcgcaattcatggacgctttggatattgataaagctgtgttattcgggtattctgccggaggcttaatcgcgcagcataccggcttcacccgccccgacaaagtgtcacaccttattctgtccggcgcctaccccgctgttcataacgtaatcggccagaagctgcacaaactgggaatgtatctgcttgaaaaaaaccccggtttgctcatgaaaatcctcgctggcagccacacaaaagacagacagcttcgcagcatattaacagaccatatgaaaaaagcagacctggcccattggcatcagtattatctggattcgcttggctacagctgcattgaacagctgccccgcctagaaatgccaatgctgtttatgtatggcggcctgcgggactggacctttacaaacgcaggctattaccgaagatcgtgcagacatgccgaatttttcagattggaatatcagggacatcaattgccgacaaaacaatggaaaacgtgcaatgagctggtgacacggtttgtgctgacacatcattcaatatagaaaacgttggatctccttgcgttttctatattttattgacttttgtcaacaaaatcatagtaaaaaagatcctcaaatttcaaattaaaatagtgaagcattttaccgatcacaagctgccccggccgtctttctccattcagcacgcggctcagtgtggcgggtgagactccgatttccagcgcaagctgattaagggaataatcgttattaaccatatactgcaagacataatcacgtctaatctgtatcttttctactggcactttcctcaccttccattcctgaaaaacttttttctatacttttacattacggcttatgttaacttttgtcaatacatttccagtctacctattccctttagtcaataaacatactaaaatatgagtaacagtgagggacggggtgagatatatggaaagctttggcgaacaattacgggcattgcgtgaagagagaaagttaacagtcaaccagctggcgacttattcaggcgtaagcgcggccggcatctccagaatcgaaaacggaaaacggggcgttcccaaacctgccaccatcaaaaaactggcagaggccttaaaaattccttatgaggggcttatgtacaaggctggttacatcgaagaagtgcatgaagccagggccccttacgaaacgaagtgcaagctgcttgaaaaagcggaggcctatgacctgaaaaaccttgcgcttcttgagaacgaaaagtggcaatatctcaataaagaagatttgctcatgctggatcattatttttcgtttatttcagacgaagccaaaaaacggtctgctgatgactgactcttgatagaaatgtgaggcgatagaccatgtcaccgttcggacagcaattacgggagctgcgccgcgcccgcaaactgacagtgaatcagcttgcggtgtactcaggcatcagctcggccaccatttcaaaaattgaaaacggcaaacgcgggacgccaaaacccgccacgattaaaaaactggcagccgtcctgaaagtgccgtacgaaaacctaatggccgccgcaggccatattcaggcctttcctgaagaaatccgcgaagcatctgaaagctatcaatccgtttatgaaatttaccagacggctgtcactcgcggagcggagcacctcccgattttcaatagtcaaaaatgggaacatctctcaaagcaggatattgaaaatctcagcaaatacttcgattttttgtcttcagaagcaaaaaaacgcgcctcttcctcataatcccctgtttctctttctatattttatcaatcacgcttgcataccctccctcgttatttgcgttataatagtgacagacgaggtgaaaagtatgaaccaatcagaaatgtgtcctagatttgaaaaagcagtcgacatcttaagtaaacgctgggtcgctttaatcgtatttcagctcttgaacgggtctcagcgatttagcgaaattgaagcagcacttccaaatctaagcggcagagttctgtcagaacggctgaaagaacttgagcttgaaggagtagtgaagcgggatgtcatccctgaaactccggttcgcatcgaatattcattgactgataaaggaaaggcactagcacccattttaggtgagatttctaaatgggcgactgaatggattgacccttcctttcttgactaattgctaaaacggctctgatctcaaagatgagaaaagagccgttttttattttttcccaggtgaaaaaacgatttctcagccgatatatagtacatccacacattacgtttttaaaggagaccactatatgcgactgacgatttcccgcaaattcagcctggtatttttgacactgatcctgatcaatttacttgtaggcggaataggcgttcttaatatgcagcatatcattcaaaaaacagatgaaatcaacacaaaatggattgacggcatcaaaggaatcacttcaattaattatgtaaccgagcacctgtcttctaaagaaaaggactttctgatttatacagacaaaagcaaaatggatacacttgatcaagaaatgaatcaaatcatggaagacattaaccaaaagctcgataactacgaaaaaacgatctccactgataaagagcagaaactgttcgagcagcttcaaactgaagtgaatacctatatggatattcatgcgcaaattatcgaaagcggccgcacgaatgacatggacaaagcaagaggtttattggttcagactgaggccagctttgaggatatgaaaaaaacaatcactcagcttgttgacttaaatcaagaaggcagcaacacagcggtaaaagaaacgaaggccgtctatcataaagggctcatttacactgctttgcttgtggcagcttcgatcctcatcagcattttcatctggctttatatcacgcgaaacattgtaaagcctatcattcgcatgaaggaatctgccaatcatattgccgaaggcgatctgtcgaacgatatggagccgctcaactcaaaagacgagctgggtgatctgaatgaagcgctgcaaaaaatggtagggaatctgagagatattgtcggatattctaaagacatatcaagccgggttctttcttcttcacaggtgcttgcaaccgcaacgaatgaaacaagatccggcagcaaacatattaccgagacgatgaacgaaatggctgagggctctgaacagcaggcccaagacgccgtgacgattgccgaatcgatgaatgagttcactgaaagcattgataaagcctataatcacggcatcaccatcagcgatacgtctcaaaacgttctcgaactcgcggtaagcggaaacgaaaatatggctacgtcattacagcaaatgaaaaccatccatcatattgttgaagaagccgtgcataaagtgagatcactggaacagcattctcaggatatcaacaagctcgttcaagtcatcaacggaattgccgagcaaacgaatttgctgtcccttaacgccgcaattgaagctgcccgcgcaggagaaagcggcaaaggcttcgccgttgtggctgatgaagtcagaaagctggctgacggcgtttctgattccgtgcaggacattacccggattgtaaacgggacacagcaggagatccacactgtcattacgtacttggaaagcagctttacagaagtcgaaaaaggaacggaaaacctgacagacaccggacaggctatgcagcatatcaaacaatccgtcacccatgttgcagacagcattaaggaagtaacggatggcctgaagcagttaacaaaccaatcgattaccatcaatcaatcgattgaaaatatcgcttctgtatccgaagagtctgccgccggcattgaagaaacattttcaattaccgagcaatccgcccattcgatggatcaagtgcttctaaatgctgaagagcttgagcagctggccaatgagcttaatgagaagatgggtcagtttacgatttaaatagaaaaaagaggctggactccagcctctttttctattctatgcagctgattgaacatgtttcgccccggttctttttttcttcaccggacttaatgcccgctccagccaagccatgagcaaatccgcccctaccgccatcaccgcagttggtatcgctccggctagaataatcgcagttccgtttgttgcgtttgagccgcggacaatcatgtccccaaggcctccggcaccgacaaatgtgccgatcgctgtaattccgatggcaatgacgagagccgtgcgaaggcccgccataatgacagaaagtgcgagcgggagctcaaccattctgagtacttggaatttcgtcatgcccattgcttttcccgattctaagtaggcatgttcaatactgataatgcctgtgtacgtgtttcgaataatcggcagcagggaatacagaaataatgatagaatcacggtatttgcgccgagccccataacaagcattaagacggccagcatagcgagcgccgggattgtttgaataacgtttgttacggcaaacacccaggctgacaaacggcgaaaatgcgcgatgaggattccggccggaaccccgacgacagcggcaaataaaacgccgtaagccgacatgagaaagtggcggccgaattcatccatgacgtaactgccattctgcgcgtaatacgtcattaactgttcaagcacgttcattgacctcttccccctttcacgattcgaagtagtgatgtttttctaaatattccttggcaacgacagacggttctttgagattgccgtcgacttcatagttaagctcctgcatcgtggttgtgtcgatttttccgagcattttcttgatgatgccttcaagctcaggatgttctttgagcaccttttccggaacaaccggagagcagtcgtacggcgggaaaaattgtttatcatcctttagcattttgagaccataggacttgattcttccatcggttgaatacgcaagcacaatgtccatttttccgcttttcaccgcgtcgtacacaaggccgatctgcatcggatacgtgccgccgaatgtcatgccgtaggttttcgtaaaatcctgatagccgtttcctttgagcttcatccaatagttatcaacgcccagctttaattgcggcgcccattttttaacgtctgatacggtctctaaatggtattggtcggccagttccttgctgactgtaaaggcatatgtattatcaaacccgtaggagttataccattttaaattgtatctttttttaaactcccgctgagtaagcgccagcgctttgtccggatctttttcaggttccattctcaacgtgcctgtcagcgcgtctcccgtatatcttgtggccgcaatgtcaatttccccgttcattaaagcctgctgctgcaccgcgttggagccaagatttttaatcgttgttgttttgagatcagtatggtgttcgatcaactggccaagcatactagcgatgatttctgattcgctcatgctttgcgcgccgattttaatggtctggtctgcagcagcgctgagaccaggaagcgaacagccgctcagcgtcagcgttgccgcaagtgctaaacctatgattaatttgaggtattttcttttcatgagccccctccttatgacaattcattcaatctctgcatgccggcaggtgtcagttttcgttcagcaactgcaagcacataatcaatcacaattgccaatatcgtgacaggtaccgcgcccccgatgatatattccggctgatataaattcagtccgataaaaatgtaatcacccaatccgccgcctccgataaaggaagcaagcgtggcccagccgattaagtaaatcgtcgatgtcctgattcccgccatgatcactggcgcggcaagcggcagctccaccaagcggacttgttcagccggcgtcattccgattcctttaccagactcgagcagatttttgttgacgccgcgaatgccggtatacgtgttgcgaagaatcggcaatacggaatagaaaaacaaagccacaatggccggaaccttccctacaccaaggagcgggataaaaaaagcgaggatggccagactcggcagcgtctgaataatattgacaatgccgataatggtgccggctccttttttcattctggtaagcacaaccccgagggggacggcaaccagcacgcctaagatcacagcaatgagcgatatcgtaatatgctcgtatgttttataaagaagctcgcccccattggtttgcaaaaattgaacaatatgatgcatgacttatcgcccctccctatgacaatgctgcgagctgcttttcttctccccagagggagtcatacacgatgtcgaccagacttgccctcgtcacaattccgatcaggcgtcggtcttcatccacaacgggaacatatttgacaccccgttttaaaattttgcggaccgtgtcgcgcagcagtgtgccgcccagtactgtgtatatatcttcatgtaaaacttcactgacgagattggcctttttccggcattgatcaatgatttcaacatcgacatagccttgcagaccgcgctcgtcatcgacgaccagcaatgaatcgacccgttcctgcctcatcagctgaatggcctcagaaagcgttttatccgcggtgatcgttacaggctgtgtgttcataatctggtcaacccgttcaacatccgggctggatgactgaatcagccgctccttgccgataaattcctcaacaaattcgtctgccggatttcttaaaatgtcatcgggcgttccaacttgaacgatttctcccgcttttaaaatcacaatccggtctgccagcttaatcgcttcatccatatcgtgggtaacaaatacgatggttttatgtaaggttttttgcagttttttaaattcttcctggagggaatccctcgtaatcgggtcgagtgccccaaacggttcatccattaagataagcggcggctccgcggcaagtgcccgtaatacaccaattcgctgctgctgccccccgcttaattcatgagggtaacggtctacatattcaggccccatatcgaccaattttaaaagctcacgcgcccgctctttccgctgctgctccggccatttcagcagttttgggacgagtgagatattctgctgaatggtcatatggggaaacaggccgatctgctgaatcacatagccaattttgcgcctgagctctacaggatcctggtccatgatgttttcgccgtcaatgaaaatcttcccggcggaaggctcaattaatcggttaatcattttcattgttgttgtttttccgcagccgctcggcccgataaagcagataaattcgccttttgcaatcttaagatttacgttgttcacggcttttttgccgcccttgtatgttttcgagacattttctaatgtcagcaaacatcgcacctccaaaattaagtttattcaatttgttcagtttaaatttaatttttcagacaattgaatgcttcccattatagaataaagtttataaaataaaaagtttacaatttgttcatattatttataaagtatgtgtaaacgctgatttacccgcattgacgtgtgttgatctccttattgctccaatttcctgccaaattctcttttgacagcattttcgccgtatcaaaaatgtggtatattgacatcggaattgttagctgaaaggatgaaaccgttggagaaagatccgttaacgatcattgaacaagccgaggaccattttatagaaaaaatcgcggaaaacatgcatgcatttggaatgccctctaccgtcggacgagtgctgggcattatttatatgaatcgaaaaccgatgacgcttacggaattatctgaggccaccggcatgagcaaaacacgcatgagccaggtagtgcgggaaatgcttgatgccaacattgccgagaaggtgttcgaaaaaggcgtgcgaaaagatttatatgaggttgagcaggactactatcaaacatttatcacgctgttttcagccacctggagcaaagtcgtcagcaaaaacaaaatgatgcataaaaaactcaatcgggagctgcttagcgtgttggatgaagagcttactcctgaagcggaagaaaaagtgaatgagctgctgaaggaattaaaggaatggctcgattattataattggctcagccgtttgattgagttttttgagagcgaagaaatttttaaatatgtgccgaagccgtaaaaaacgccctgtcattacaaggcgttttttcttatgcggcacctgccaggtttttcttttttctctttttaatcgggcttaatgctcgttcaagccagcccatgaccaaatcggcaatcaccgccatcagagctgtggggatcgctcccgctaatataatcgcggttccgtttgtggcgtttgatcccctgacgatgatgtccccgagaccgcctgcaccgacaaatgtcccgatggccgtaatgccgatggcaatgacaagcgcggtgcgcaggccggccattatgaccgaaagcgcaagcggaagctcgaccatccgcagcacttgaaattttgtcatccccattgcttttccggattcaagataggcgtgctcaatactgataatccctgtatacgtatttctgataatcggcagaagagaatacagaaataatgacaatatcactgtattagcgcccagccccatgacaagcatcagcacggcaagcatggcgagagccgggatcgtctgaatgacgttcgtgaccgcaaaaacccatccgcttaatcttctgtatctggctatcaggatgccgagcggaattccaacaatggcggcaaataaaacgccgtataccgacatcagaaaatggcggtaaaactcctgcagcacataaccgccgttttgcgaatagtatgtgccaagctgctgtagtacttccatatgatccacctcttttcttagtcaaaataatgatgtttctctaaaaattcctttgctacgacagacggctccttcagcttgccatccacttcataattaagttcctgcatcgtttccgtgtcgatttgcccaatcagcttattgatcacaccttcaagctccggatgcgccttaagcaccttttccggaatcaccggtgaacagtcatacggcgggaagaaacgcttatcatcttttaagattttcaagtcataggctttaatccgtccatccgttgaataagccagaacggcgtccattttcccgtttttgactgcgtcatagacaagcccgatctgcattggataagttgtgccgaattcaaagccatatgtgctgacaaagcctttatacccgtcaccttttcgtttcagccaagcattgtcgacgcctaatttatattgggaggcattttttttcaggtcggacacggtgttaatatgctcattttccgcaaacttttttgttacggtgaaggcatacgtgttatcaaagccgtaggaatcaaaccatttataagaaaagcgcttttgaaactcgttctgcacaatgttcagcgctttttttggatctttctccgcttccttgccgagggtgcttgttaaatctgttccggaatagcgcgtggctgaaatatcaatgtcaccgcccagcatcgcttggtgctgaacatagtttgagccgaggtttttcactaaagcggtattcaaatctgtatcatgttcaataagctgcgcgatcatattcgctaaaatttctgattctgtcatgctttgcgccccgattttgatcgtgtcgtcagaagcgccgccgagacccggcagagagcagccgcctagcagcatgacaaagacgagagcaaacgcgccaagccatttgatttttgtcgttttcaacagagccaactccttacgaaacttccttcatcccttgtaatcctttcggcgtcacctttcgttctgtcacggctaggacataatcaatgataattgccagaattgtgacaggcacggcaccgccaatgatatattcaggctggtataggttcaggccgataaaaatatagtccccgaggccgcctcccccgataaacgacgcaagtgtcgcccagccaattaggtagatcgttgatgtgcggatccccgccatgatgatgggaattgccagcggaatttcaacgagccgaatctgctcccagcctgtcatgccaatccctttccccgattccaggaggtttttatttacacctttaatgccggtatacgtattgcgcaagatcggcagtaccgaatagaaaaataaagcgacaatcgcaggcacttttcctacgccgagaagcggaataaaaaaggctaaaatcgccagactcggcagggtttgcacaatgtttacgaaaccgataaccgcacctgcgccttttttcattctggtaagagcaacgccgagcggcactgcaacgataatgcccaatacaacggctatgagtgaaatatataaatgctctcctgttttatacagcagctctccgccgttcgtttgcaaaaaagtcatcatttgattcatcttaaaagagctcctcccctggtcagatcgtcatgagctggttttcctcgtcgccccaaatggaatcgtacacgatatcaacaaggctcgctcttgtcacaatccctgctaaatggttctgttcatcgacgaccggaacatacttgatcccctgcttcaaaatttttcggactgtatcgcgaagtagcgcccctttttgaacggtatatatatctgagcggtatacatcgccaacgatgctcgcttttttgcggttttgatcaatcatttccacatcaacatagcccttcagcacgttttgccggtccacaacgagcagcgagtcaacacgtttttctctcatcagctgaatcgcctgagaaagcgttttgtccgcagataccgtcaccggcgttctgttcatcatttgctctacccgctcgatatccggtcttgactgaatcaggcgctctttcccgataaattcttcaacaaactcatttgccgggtttcgaagaatctcatcaggtgtgccgacttgaacgatttctcccgcttttaatatcacaatcctgtcggcaagcttaatcgcttcatccatatcgtgggttacaaacacaatcgttttgtttaaggttctctgcagttttttgaattcttcctgaagggaatcacgcgtaatcggatcaagcgctccgaacggttcatccattaaaatgagagggggttccgctgccagggcgcgcagcacgccgattctctgctgctgtccgccgctgagctcatgcggataacggtctaaatactctgggcccatatccacaagctttaacagctcgcgcgcccgttctttccgtttttcctcaggccatttcagcagctttggtacgagtgagatgttctgctggatggtcatatgggggaacaaaccaatctgctgaatcacatagccgatttttctcctcagctcaaccgggtcctgttccataatattttctccgtcgataaagatccttccagacgatggttctatcagtctgttgatcatcttcatcgttgtcgtttttccgcagccgctcgggccgataaaacagataaattcaccttttgcaatatctaaatcaatgctgttcacagcttttttgccgcctttatatacttttgacacttgttccaatttcagcaatccgtgcacctccgcaggtttcctttaaattttctgaaaagtataatccttattatagtttgaactttgtaaaataaaaagtttacaatgtgttgaaattatatgttatttatagattatttattgttatgaccgagacggaaagggtgttcttacaattacgccggatacctcccacttcctctgcattcagctattttcaacaccaggaagaaatatgatatattgacaccatcaattgccatttgaagggatgatcagctgtgaaaaaaaccgctctcgacatcattgaacatgctgaagagcatctcattgagaagattgccgaaaatatgcatacgtttggaatgccttcaactgtcggacgtgtgctcggaattatttatatgaatcgaaaaccaatgaccttaagcgagctctctgaggcaacgggcatgagcaaaacacggatgagccaggttgtccgggaaatgatcgatgccaatatcgccgaaaaggtgtttgaaaaaggcgtacgaaaagacctttatgacgtcgagcaggattattatcaaaccttcatttctttatttgcggcgaattggacaaaggtcgtgagcaaaaacaaagtgctgtataaaaaattaaaccgggagctgagtgatcttttacaaagggacgggcttaccccggaagcggaagagaaagtcaatcagctgctgaatgaattaaaagaatggcttcattactatgattggctgagcaggttgattgaattttttgagagtgaggaagtctttcggtacgtgccaaaaacaaaagaaagcagctctctaaaataagggagctgctttttgcatcatgaggttaagatcggaaacatgcctttcagccccgcaccaatcatcccgaccgcaaccacggctaagattaatcccatcagtctggtaatcacattcatctcggtttttccgagtttgctgctgataaaagcagaatagtggaaaaagagaaaggtcagggcaataacggcggctatgccgatcgtgacagccgcataatgaccaatgccgctatgaccggcggaaaggctcatcactgttgcaatcgttccgggcccagcaatgatcggaatggataaaggtgtgactgatatatccgctttttccttgctttccttatgttcatcatggtgaagagattgcacgtgtgattctttcgcattcaatagattataggcaatgccgaaaatgaatatgccgcccgccactcggagcgcgtaaatgttgatatcaaacagtttaaagataagatgaccgaaaaccaaaaaagctgcgagaataaaaaaggataaaatagctgccttccgggcaatcgcttttctttccgctgcagtatagccttctgtcagcgtcagaaatatcggtacgtttccgatcggattcgatactgcgaataaaaaatgaagacgtgaacgataaatgagaacatcatatacctccttgttgatagtctctgcacaggaaatagaattattctccacccttttacccggaggcgatttcccggtaaacctttatagcctgtcagaaacgcgccatgctacaatgaagtgacaaattgaataggaaggacgtatacagatgttcaaaaaaattgcggcagatgccttgggcttatctgatatcggaaaaattatcgtacctcaggactatgacaaaacagacgcagacgactatgtcatgcatgaagataatgagaaaatttatttcttgattaaaacaaaagcagacgagtattgctttacgaacctggccctgatccatgtagacggcgaacgcgccacttcctcgaaacgaacgttgaaacgctatccttattcgcaatataaaatctctgacgtttttcttgaaactgccggaaaagtggatttggatgttgaaattaagttcaagctgggcggtgaacaattcgacattgatgtccacaaagaccagattgaaaagttaaaagacctttataaagcactgcttcgcatcgctgaaacaacctatgaaaatgacattttaatcaatcaagcggagcaaagcttagataaagcagtgacgattcttcaccatacccgccctgagcacgtcaatattgaaacgcaatacaaagagctgaccgaattcggattcacttggctgacatccgttcgctcgcagtatcatattaaggattttggggatgtatttgagaaatatattaataactagataaaagaagacacagctgctatcgtgctcgtgtctttttttgtatgaatattgattactttacaacttttttcttttataataaaactattagtctattttccctatattacagataaaggagttattttatgtattgtcctcaatgcggccatcaaacagatggcggaaatttttgtgagaaatgcggatcaccgctccccggtcaatcaggccaccagcatgcagctcaaactggagccgctgcaaagcaagcagcaaaacagttcggttcatttgtcttatccgtcctgaaacgcccttatcaggaatgtaaagcaacaggcggagaacagctgatcagcgcaatcattacgatcgttcttttcagtttgctgacccctttgatgttttatattcttttttcagacggtcccgaaagcgtaagctttacagcaatcttcttagagccaaccatttattttattttatttctatttggcctgcatgcatgcatctttttcgccctgaaaatcgcgggaaaccaagtatctttcaaggattcattctcaagattcggagcgtttctcataccgtttacggctattttgattcttgcccttttcttctttttattacatacagacatttgctttaccatattagccgttggtttaatcggtgcattcttcgccattcctcctgcgatgctgagcagttaccagcattcatataaagggaaggttgatgtcatttactcaacgattgtaatttatctgatcatctgcgttacatttcagcttattatcgaacactatgtcaaagaaattttccgttatatgctcttttaaaaacaatcccatcacctgctggtgatgggattgttttattgaatagacgttaagtaaattcttccgttcttcactacgccggtgtaggtccagttatatgttctgagctttggactgccgcctgattttgtgatatagaattcttcatacgtcttaatcgtgatagccgacccattttggctccagcttttcacttcatagttattaaagtcttctgttgtcccctctttatttaatttcgacacgagatgctgctggtcggaataaagggaactgcctttttcaaggctgtcttccatcagtgagaaattattttgattcacggcatctgcctgactttgcagataactgcccataaataatgtcacttgttcatctgtaacatcgccgcttgcagagctttcactgcctttgtttttcgagccagcccaggcggaagtgtatgtctctggtttatcatttttgattttctttatatttgtgcctgcagattcgaatgttgattctgcatcttcgaaaatccactttttctgttttttatcatatgaaagaagatattcataactcggactgtcgtcagtcatttcagattttgtatagtcgttatacgaagaagactggtgaagttcttttcctgttaccgatacctgccacgttccgtcgtttttctgagagagggcaaatgtgtccaggtcaaaatcagtttccaagtatctatcttttaagtatgaatccgcgcttttcatagaatcgacggtgtccttcgtctccgccttccaattggcacttgcctctgtcatctgggctgtattcccatcagatagagctttggagtattgttttgttgttttgacaattgtgttcataatctgttcctgtgtatcttgatcaggaattaacgttaactccatttctttatcatcgatcggaacgccggcagtttttgtttttccccacggaaattctgcctcgactgaagctgtcattgatccatctgtcagcagcggaccatatgttacggatttgaacggatctttatgaattgacttgccgttaatcagcaaatctcccttcccgctcttgatgtcatccgctaagctgaatgtcacatcgtctgcttccaatgagagatcaacacgaaagctgctatcgccaatcgcctgaatgtcttcctttttcacaaggtcaacgacatcgtttttcagtttggctgagactgtatattcgccgggaatgtacggaccaagggtttgtgcttgatctgctttctttacagatccggcttcctctttattgacatatagatcggtatttttataattgctgctcacttcaaaataaacaggtgctacctttaagtcataatggtcaaataccagcaggcttttcccgtctttttctgcatatacgatatccttctgggctgtttcatcccgcagcgatgcaaaaagttcatcttttttgtctggatgatccttcaaatatgtaagaaacggttttacattatttttagtgagtttaagattgtcatttaccggtgtaagcagagtcgcgatttggtcctgatccccatcatttacggcctgttcaaacttgtctactaacctatcctttgaagtaaaatacgctccggttttatatgcggcgaataatataacgcacgccgcggcaatgctgctccataaaatgatggttttcttagggatcggttttcgcggagcctgccttgtttctgcagtgctagctgtttcttgatttgcctgtttgctaccccctccgatcggggtgccgcattgtttacaaaacttggctccttcattattctgggagccgcaattcttacaaaaaaacatgactttcctcctattctactaatttgataacatttactgcttttcatattttataataaaacagaatgaaattgggaacgaatgaaaaaattaaatgtctatcagactaaaaaggtggtacgaatatgcaaaagctcaggattgaattaggagaagaaacaaatgacgaactatatgatctattgctgctcgccgatccatcgaaagacattgtagatgaatatcttgagaggggagaatgttacacagcttgggccggtgatgagcttgcaggggtttatgtattgctaaaaacaaggccgcaaacagttgaaattgtaaatattgcggtaaaagaatctcttcagaagaaaggctttggcaaacagcttgtacttgacgccatcgaaaaagcgaagaagctgggggcggacacgattgaaatcggaacggggaattcgagcattcatcagctttccctctatcaaaaatgcggattccgcattcaggcgatcgaccacgatttctttctcagacattatgatgaggacatttttgaaaacgggattcaatgccgcgatatggtaaggctttatttggatctctgaaagcataaaaaagccgccgagagaaaatcccggcggtctttttattacttgtttaagttgtagaaagagttgataccgtggtattgagcagtttcagccaactgatcttcgatgcgaagaagctggttgtatttcgcaacacggtccgtacgagacggagcacctgttttgatttgtcctgcgtttgttgccacagcgatgtcagcgattgtgctgtcttcagtttcaccagaacggtgagagataacagctgtgtagcctgcgcgtttcgccatttcgatcgcatcgaatgtttcagtcaatgtaccgatttggtttactttgatcaggatagagttgcctacgccgtttttaataccttcagaaagttttttcgtgtttgtaacgaagaggtcgtcaccaacaagctgaacttttttgccaagacgctcagtaagaagcttgtggccttcccagtcgttttcgtcaagtccgtcttcgatcgagatgattgggtatttagaaacaagctcttcataccagtcaaccatttcagcagatgttttcacaacgccttcgccagacagatggtatttgccgtcttctttgttgtagaactcagaagatgcagcatccatagcaagtttaacttcttcgccaggtttgaagccggctttttcgattgcttcaacgattgtttgaagcgcttcttcgttagaaccaaggtttggagcgaatccgccttcgtcacctacagcagtgtttaagccttttgcgcttaatactgatttcaggctgtggaagatttgagcgcccatgcgaagtgcttcacggaagttaggagcacctacaggcatgatcatgaattcttgaatatccacgttgttatcagcatgctctccgccgtttacgatgttcatcatcggtacaggaagcgtttttgagttgaatcctccaaggtattggtaaagaggaatctgtaagaaatcagcagcagcacgcgcacaagccatagatacgccaaggattgcgttcgcaccaagtttacctttgttttcagtaccgtcaagctcgattaaaagctgatcgattgcgttttgttcagttacatcaaagccaagaagctctggagcaatgatttcgtttacgttgttaacagctgttaacacgccttttccaaggtaacggtctttgtcgccgtcacgaagctcaaccgcttcgtattcacctgtagaagctccgcttggcactaatgcgcggccgaaagctcctgtttctgtatatacttcaacttcaactgttgggttgccgcgggagtctaatacttcgcgtgcataaacatcaacaatgtatggcatgagttttgtctctccttttgattttcaaattatttttgaattaaagatgttcctgtcatttctttcggtttttcaacaccaagaaggtctaataacgttggtgcaaggtcgcctaggattccgccttcacgcagcgtaatgccttctttcgttacaatcacagggactgggtttgttgtatgcgcagtgtgcggttcgcctgattctgtaatcagaatgtcagcattaccgtgatcagcggtaatgatagcgtgtccgcctttagcaaggatcgcgtcaacgacttcgcccaagcattcgtccactgcttcaattgctttaattgttggttcaaccattccggagtggccgaccatatcagggtttgcgaagttaagaatgatcgcgtcatgcttgtcagcttcaatttctttgacaagcgcgtctttcacttcatacgcactcatctcaggcttcaagtcatacgttgcaactttaggcgagttgatgagaatacgctcttcacccgggaattcagcttcacggccgccgctcataaagaacgtgacgtgcggatacttttcagtttctgcaattcgaagctgttttaacccgtgctgagataatacttctccgactgtgttatcaagatttatcggtttaaacgctacatagccgtcaactgtttcactgaagtgagtcaggcagacgaaatacaggttctttggataattctcgccgcggtcgaagtcacggaagtctttgtttgtgaacgtgttggaaatctggatggcgcggtccggtctgaaattatagaaaatcacagaatcgccgtcttggattttcgcaacaggctcaccgttttcttttgtgatgacagatggaatcacgaattcatcgtagataccatttgcatatgaatcatcaacaacatccagggcgctgcggtaagatgggccttcgccgtacgccattgcgcggtacgctttttctacacggtcccagcgtttgtcgcggtccatagagtagtaacgtccggaaatgctggcgatttcacctacaccgatttccttgatttgatcgttcaactggttgatgtacgttttcgctgtctgcggacctacatcacggccgtcaaggaagccatggatataaacctctgtcagcccttcttttttcgcaagctttaacagtgcgaataaatgattgatatggctgtgcacgcctccgtcagataaaagaccgaacaggtgcaaggctttgttgttttctttcgcgttgctgatcgcgtcaaggaatgtttgattgcgttcgaactctccttcgcgaatggcaacatttacgcgtgttaagctttggtacacaatacgtcccgcaccgatatttaagtgacctacttcggagttccccatttgcccttcaggaagacctacagcctcgcctgaagcagtcaatgtttgatgaggatactggttccaatagcggtcaaaattcggttttttcgctaaagcgactgcgttccctactgtttcgttacgtaatccgaacccatcaagaatgatgagtgcagctggttttttactcatattgaccttcctccaataattgaacgaatgactgtggctcaaggctcgcgccgccgaccaaagcaccgtcaatatcggactctgccatatattctttaatgtttgcaggctttacgcttccgccatattggatgcgaagcttgtctgcagcttcttggctgaagctttcagcgacggttttacggatatgcgcacacacgtcattcgcatctttcgctgtagaagatttgcctgttccgattgcccagattggctcatacgcaataacagaagcagcaacttgttcttcagaaagaccagcaaggccttttttcacttggtcagcaacaagatcatttgttttgccggcttcacgctcttcaagcgtttcacctacacagatgatcggcacaatgccgtgtttgaaagctgcgtgtgcttttttgttaactgtttcatcagtttcagcgaacatttcacggcgctcagagtggccgatgacgcagtagtcaacgccaaggtctttcagagcaaccgggctgatttcgcctgtgaacgcgccgctttcttcgaagtgcatgttttgagcgccgacttttaggtcagtgcctttcacagcagaagcaagcttttctaagaaaagcgctggcgcgcaaacaacagcttcagctttgtctgctgctggaatggaagatttcacttcttcaacgaagctgacagcttcgccgagtgttttgttcattttccagttaccggcgataattggttttctcatctgttccacttccttatagcagttttgagattatttatcgttcagtgcagctacccctggaagctctttgccttccataaactcaagggatgcgccgccgcctgttgagatgtggctcattttgtcagcaaggccgaatttttcaaccgctgccgcagagtctcctccgccgatgacagagtatgtatctttcgcctctgccaatgcttccgcaaccgcttttgttccttgagcgaacaagtcgatttcgaatacgcccattggtccgttccacacgacaagtttgctgtttttgatgacgtcagcatacgtttcgcgtgttttcgtaccaatgtcgattgcttctaaatcactagggatttcagagatcggcacaattttcacgtttgcatcgttagagaaatcatctgcaacgagtacatcttcaggcatgtagaagttaacgcctttttctttagcgcggtccataaatgatttcgcaagctcgattttatcctcttcaagaagagatttaccgacttcatagccaagcgcttttacgaaagtataagcaagacctccgccgatgatcaggttgtctactttatcaagaagactctcgattacaccgattttgtcttttactttcgctccgccgatgatcgctgtgaacgggcggtcaggattggaaaccgcttttccaagtacatcaagctctttttccattaagaaacctgcaactgctggcagatgctcggcaattccagctgtagatgcgtgagcacggtgggcagcaccgaatgcgtcatttacatatacatctgcaagctcagcaaatgcttttgcaagctcagggtcatttttctcttcaccaggatagaaacgtacgttttccaatacaagaacgtctccgtccttcatctcagaaatttgtgcttttacagcatcgccgtatgcttcatccgcttttttcacttctttgccaagcagttcgccgagacgtgcagcgacaggagttaaacgaagctcctcaaccacttcgcctttcgggcggcctaagtggctcgcaagaaggactttggcgccttggtctgcaaggtgtttgattgttggaagcgcagcacggatacgtgtatcgtctgttacttccccgtctttcattggaacgttaaagtcaacgcggcagaatacaactttgccttttacgtcgatgtctttgagagtttttttattcatgcctaggagatcctccttcaaaatggtttgcatacagcacgaaaaacgtgaaaccgtctgttcaagcgataacgccgctagggcagatcgcagtctttttcggcacagggcagttcgtctaaaagccagggcagcggccttaggcgaaagcgccggcaaagctgcttaaaacgcggtcgtttctctatcacagagcgttttctgaaagccggtcttcatggaaaaagggaaagggagtccgtccccttcccttgtccgctttcattatagcgcttctattcgaaagaaccaagtcaggtcctttttcagctataaattaaagacctttttttgcgatgtaagctgcaaggtcaacaacgcggttagagtagccgctttcgttatcgtaccaagagattacttttaccatgctgccttccataaccattgtagaaagagcatcgattgtagaagagtttttgtttccgttgtagtcgccagaaactaatggctcttcgctgtagccaaggattcctttaaggtcgccttcagccgcttctttaagagctgcgtttacttcttcagctgttacttcttggttcagttcagcaaccaagtcaactagagaaacgtttggagttggaacacgcattgctccaccgttcagtttgccttttagttcaggaagaactagagaaactgctttagcagcaccagttgatgttgggatgatgttttcagctgctgcacgcgcacgacggtagtctttgtgcggaagatcaaggatttgctgatcgtttgtgtaagagtgaacagttgtcatcataccgcgtttgatgccgaatttatcgttaagtacttttgcaaacggcgcaaggcagtttgttgtgcaagatgcgttagagataacatcgtggttagccgcatcgtatttatcttcgttaacacccataacgattgtgatatcttcttcgttagcaggagcagagatgattacttttttcgcgccagcttctaagtgtttcgcagcgtctgcgcgttttgtgaagaaaccagtagattcaactacgatttcaacgccttgtttgccccagctaagtttagcaggatcgcgttctgcagaaacttcaattgttttgccgttaacaacaaggttgttaccgtcaactgaaacttcagcgtctaattttccgtgtacagaatcatattgtaaaaggtgagccagcatgttagcatctgttaaatcgttaaccgctactacctcaacttcaggattgtttaatgctgcgcggaatacgttacgtccaatacgaccaaaaccgttaataccgacttttactgccatgattgtttcctcctttaaataagtgagagatatttatattgagggattattcatcccttaataacttctttgcggctccttcgtctgtgacgagaaccgtgttgcgtggctttttaaagtaagcctcgatcgcctcggcttttgatgatccgcccgctaccgcaataatatcggggatggcgtctatgtcatccagctgcattccgacagaatgcactttgtgaaccacttcgccgtccgcgttaaaatagtagccgaacgcttccgtcaccgcgtcgttatcatctattttctttaagtcttctaaaggcgtgtttctgcgctgagccatagttttagcttcgccgattccatgaaccagcatactcgctgatttaatggtgttcagcacctctttgacagaaggctcttcaataatagatgaataggcgccttgtgacagctgtcccggaacaaacaaaagccggtaagtgcctgaagccttctccgccatatgcgcgcatatggtgttcgcctggtttttcacgtcttcgcctaaaccgcctcttgcaggcacaaacaaaagctcgcggtttttagaatccggcgtcatcatttcggcgacagcttcaattgtcgtaccgccagttacagcgacgatatttttgcctgaaaatctttttttcatacatgcgacagccgctcttcccatttcttttttgacccatggggattgatcgctgtctccggatacgataatggcatcctttagatttaaacgttcttttaatgtcttttccaaaagagtcaaacctaaaacatctttcatcgtatcttccaaaacagaaagcagttcatagccctcttctgtcaatgtcatgccgtttgtcttaatatcgaccaggttctgttcctttaaaaactgaacctcgcccctcagcacacgctcgctgatttcgagactggcagacaggcttcttcgcccgatgggttctgtcagcctgatatactgcaagatttcaaacctcttttgcataacgagcagaagatcaggcaataattttttttgagcttgtattaactggttcatgactcaaacgttccttccttttttgctggacgttatatgtcccgctatgacaaaaaacgtcccgtcatagccaaaaaaaatcatttctgctttctttaattattttaacagggtggaattgtttattcaactgttaagagccaattcatcgacaatattcgcagagttttcatgccgcgtcgttttatccagcaatattttatcctatatatctttatcttatacagaaagcgccaaatggtgcatcccaatataaacagcccttcccgtagaaagggctgtttcattaaagcgttttcattttatccaaagcttttcaatttcctcgagcgatttgttcttcgtttccggacagatcgtaacgacaaacaggaaacaaaggatgttaatcaccgcaaagatccaaaatgtataggcgagcccgaaagaatcgatcatcattggcacaaactgtccaatcgcccagtttgctccccataaaaagatggtcgcaatgcccgcggcccgcgcacgcagatggttcggaaagatttcagaaatcataatccatgtgatcggtccgaccgagacacagaaagcagcgacaaaacctaatataaggacgatcatcatgatcccgcttgttaactcaaagtaaaacgacgtcccgattaaaatcataaaaatagccataaaagcagaaccgatggacatcagtttttttcgtccgactttatcaatcagcaacaccgcaataacggtaaagatgacttctacaacaccgacgatacaagttgtcacaaatccggcgttttgcccgaatcccatcattttaaagatttccggcccgtagtaagtaatcgcgttcatgccgatgacttggttaaagagcgccagcaggattccaatgacaagcgcctttctgagccccggcttaaacagctgggagagcgaccccatttgttctatttttaaagagttctcaatgttctttaattcttcttttgcaacagtttctccattaatacgtgtcaggatctttaaagcttcatttgttttgcccgctttcgccagccatctcggactttccgggacgacgagcaggacaaggaaaaagatgacggacggcaccattccataagcaagcatccatctccagccggtgtgcacgccccattcgtatgttccggaccgctgcacagctagattaataaagtatgtagcggaaatacccagtatcgtaaagagctgatataaggaagataaacttccgcgtatggcgggcggtgccgcttctgtaatatacgtaacagagagcgatgagcccatcccgattcccagccccccgataatccttgcaatgattaaggtggacacgtcttgagaaagcgctgaaacgattgctgatatcgcaaataacaaagcggctgtcattaaaatttttctccggccgaatctgtcacttaaaaagccggatatcccgacgcccacaactcctccaatcataatgcttgaaatgacaagtccctccataaacggactcaggctgtataaatctttcagaaaaccgatggcgccagaaatcactgccgtgtcatagccatacaataagccgccaagccccgccgcacatgagatcaaaatgacaaatcccattgaatggcttcgtgttacaggaacatttggttctaattgagttggagtattcttcatttccctgccctcccgaatgttgagtaaagcgttttcatttaaaccttaaattgtacgtacttatattaaaatttaacgaaaattacatttaattagtacgtacaaatatagaataatcttgtttgcattttctgtcaatgttttcttacaaagaacgctgtgatatactgaaatttgtccgtatacattttggaggaatggatatgttaccaaaatacgcgcaagtaaaagaagaaatcagttcttggattaatcaaggcaaaatactgcccgatcaaaaaatccctaccgaaaacgaattaatgcagcaattcggcgtcagccggcataccatccgcaaagcgatcggagacctcgtatcactaggtctgctgtacagcgtgcaaggcggaggcacctttgtcgcttcacgctctgctaagtcagcgctgcattccaataaaacgatcggtgttttgacaacttacatatcagactatattttcccgagcatcatcagaggaatcgagtcctatttaagcgagcaggggtattctatgcttttgacaagcacaaacaacaacccggacaatgaaagaagaggcttagaaaacctgctgtcccagcatattgacggactcatcgtagaaccgacaaaaagcgcccttcaaaccccaaacatcggctattatctgaacttggagaaaaacggcattccttttgcgatgattaacgcgtcatatgccgagcttgccgcgccaagttttaccttggatgatgtgaaaggcgggatgatggcggcggagcatttgctttctctcggccacacgcatatgatgggtatttttaaagctgatgacacacaaggcgtgaaacggatgaacggatttatacaggcgcaccgggagcgtgagttgtttccttctccggatatgatcgtgacatttacaacggaagaaaaagaatcaaaacttctggagaaagtaaaagccacactggagaaaaacagcaagcacatgccgacagccattctttgttataacgatgaaattgcgctgaaggtgattgatatgctgagggagatggatcttaaagtgccggaggatatgtctattgtcgggtacgatgattcacatttcgcccaaatctcagaagtgaaactaacctctgtcaaacatccgaaatcagtgcttggaaaagcagccgccaaatatgtcattgactgcttagagcataaaaagccgaagcaagaggatgtcatatttgagcctgagttgatcattcgccagtccgcacgaaaactgaatgaataaaaaaagcaatgtatgggtctccccgctacattgcttttttttatagctgttatctgttgttccaaacgtcagcgatgatttcaaacgaacgcattctgtctgcgtgttcaaaggtttctgagttaaccataatttcgtcagcctgtgtcgttttgacgaaatcttcaagcttcgccttcacttcttccggacctccgacaatcgtggagctcagctgctcattgaccatcgctttttcatacgggctccagatttgatccatatcctcaacaggcggtttaagctggttcggcgtaccgcggacaagatcaagaaacctttgataatgcgaagtcgcaaggtgctgcgctttctcgtttgtatctgccgcgataatggtgacaccgaccatcgcatacggttcgtcgagcacgtctgacggcgtgaaggaattgcggtaaagctccaatgcaggaaccgtattcgctggtgaaaaatgagcggcaaaggcaaacggaagacctagttcacctgccagacgggcgctgaagccgcttgagcccagcagccaaatcggcacatctatgccctctccgggaatggcgcgaacttgattgcgcacatttcctgacggtttaaaataattgcgcagttcctctaattgttctggaaaatcctccccgctgttgatgtttctgcggagcgctctggctgtcaattggtctgttcccggcgcacgtccaagccccagatcaatccgcccgggatacagtgtttccagtgtgccgaattgttcagcaatgactaatgaagagtggttcgggagcataatgccgccggaaccgacgcggattttcttcgtgcctccggcaatatggccaatcaaaactgcagtggcggagcttgcaacaccttctatattatgatgttcagcaagccagtaacggtgatagccccattcctctgcccggcgcgccaagtccatgctgtttcggaatgattctgcaatcgttcctccctgaacaaccggagataaattcaagacagaaagcaaggtatctttgcgttggttgttagacatattgttctcctttgcaaatgtgttatcagtaaacagcccaaagctgtcaggtcatgattgaaagaacttctatcacaccataacacaactgcattcaggaataaaagaattttattcgatgaaattcgaacaatgtaaaacgaacggtttggcccgctattctgctccaaacagctccttagccatctcaataaagagcttagccgccagagaagcctcctttagcgacggaacagcaagctgcacatcacggtatacctgcgggtccaattcccgggtcaccacatgctccggaagcggcatccccgacatggacatttctgataaaatcgcgagacccaggccttctctgatcatactgatcgaggtgttgatgttatagaccgtgaaagctgggtgcagcgtagcgcccgcctgcctgaacatatcgacaaatggtgattcatagcctccgtcacagacgatcatcggttcatggtcaagatctttcagcgtaatggccgaatgactggcaagcgggtgatcgtccctgagcacgacagccattttgtcttttttcaaatgaatgtactccatctcctctgttggatacagaagaatcccaacatctatcatccgcgtatgaagccactccttgacttcatttacagttccctcgtgcagcacgagctcaagttttggatatttttgtttaaattcactgatcagcttcggcataaaataagccgaggcagttgagaatgtgccgatatggatcgttcccagttcaagccctttttccgctgctgctacctgctcaactttttcaatgccttttaagacttctctaatgtatactaagatctgttttcccgtatccgtcagcatcaggccattgcggcggtcacgaatgatcagctttacatcaagctcagcttcgatcgcagaaatcgcatggctgacagccggctgtgtcatgttcagcgcctgacccgcttttgtaaagcttcccgtttcagctattttcacaaaaacctttaattgtgtaatggtcataacaatttacttatgctccttataaaaaagattcattttatttatcttatgttctaccgtatcatatgatggaaaagttctacaaggagtgaatgaacaatgaagcagctctcaaaaacgcggacagctctcctgctcgcatttctcgtcatcatgtggggcgtcaattggccgctgtccaaagccgcgctcgcctattctccgccattattgttcgcgggcatccgaacgctgatcggcgggcttttattagtcattgtcgcactgccgcgtattcataaattacgcttaaaagaaacgtggccgatttatcttgtttctgctcttttaaatattacgttattctacggcctgcaaacgatcgggctgaattatcttccggccggcctgttttctgcaatcgtcttcttccagcctgttctgatgggtgtattttcttggctgtggctcggcgaatccatgtttgtaatgaaagtgattggcctcatcctcggttttgcgggagtagccgtcattagtgctgcgggctttggcgggcatatttctgtcattggggttctgctggctctcggctccgcaatcagctgggcgctcggaacggtatatatgaaaaaaacaggcagccgcgtcgattccatctggatggtcgctctgcagctgacgatcggaagcgtgtttctgctaatatccggcttttggacagaaagcttttcggcgatccaatggacagctccgttcattacgagcctgctgtttatctccgtattcgttatcgcactcggctggcttgtcttttttacgcttgtcggttcaggagaagcaagcaaggtcgcatcttatacttttttgattccgctcatatcaatcgtggccagctccattttcctgcatgaaccgctcacccttagcctcttggcagggctgctgctgattgtcacgagcatctgtctcgtgaatacaaaatcaaaagcgcagaaagctgcggcgattggtataaacgagaaagctgcacaataataaaaaccctcttgccggatgcggcaagagggtttcttatttactgatgcttgcgtcctttgaccaaatatgcaactgtaatcaaaaggtagatcgccgcagtaatgccggtaatgacaattgatgttgtcatgatgaccccgatcagaatggcgagtaatgccacaatcgcaaaccatgtcgtgtacgggaaccattttacataataggccggtgtttccgtttgctgttttctcgattttaaatgagcgaatccgatgatcagccaaatgaataaaacggtatatcccaatgatcccattaaataattaaatgtttggcttcctgcgaacagagaaatcaatacgccaatatagagagaagaagtgcacatcagaatcgcaaacatcggtacgtttttcgatgaaagcttcgagaagacctttggaagccttccgtcacttgcctgtgtatacaaaatgcgtgatgatccgtataaacctgaattcatagaagaaatgatcgccagcaggatgactgcattcatgatatgatccgcgcccggaatgcctaccattttaaagaccatcacgaaaggactttccggaaccgaattgacttggttccatggaatcaggctgacgatgatgaaaaacggcagcaggtaaaacgcgacaatccgtgtcagtgtgctgcggacagctttcgggacaaccttttccggattttttgtctctgcaagcgttacaccgataatttctgtaccgccgtaagagtagatgacgacaagcatcgccgtgatcagccctgtgccgccgtgcgggaaaaatccgccgtggtctgtcaggttggaaaatccggatgctgtatgatcaccgaatgatacaaataagagcagcaatcccagaataataaagataataataacggtaatcttgatcattgccagccaatattcggtttcggcgaagattttaacagaaagcaagtttacaatcgtgacgataagagaaattcctaatgccaacacccagatcgggcagcccggcagccaatattgaatgaaaattgcagctacaacagcttcagccgcaatgttgagcacccacattttccagtagatccagtccaaaagtaagcggcgtaatttcccaatacctgttggacaagatcacggaaggttctggcgttacggtttcgaacagccatttccgccagcccctgcataataaacagcaaaataatcccgccgagcagatatgcgagaatgacagatggccctgccacatcgatcgctgagctgctccccttaaataaacctgcgccgattgctccgcccagcgccatcatcataatatggcgggacgtcatcgtgcgttttaacgtttgattgtcgtttttcatcctcttctacctctccttctcgttttcaaaaacaaaaaagcccgccgtctcctacctaatctaatagataaagagacgacgagccttcggctgaccgcggtaccactcttgttgattcttcatgaagaatcctgcttttgacctgtaacgaaggttagccgttaaaacatagggaatattcaatctattccgttccgtcttaccactcccgggcgagttcaaagaagaatcaggctgcgtcgcaccaccccgcagctctctgttctgatcactttcttttactgctcccaatctatgtgttttagttttctgaaaaactcaaattttatgatctgaatatattaacataatatacgtgcttctcttttaactgtcaataacttcagagaaaaaagaaactgttattttgtcccttttcgaatggctttccaaaaggattctgactcgtttcctaatgcgtaaactgaaacacctgctattttatattgctttgccagatggcttttcgtttgaacggttttttcgttttcataccacacgacatgtttatgcttctttttgtcaacataagaaaacgtcatcgagcctgattttttgttgaatgccggctttgctttttgttttttgatgagggatttgagctcattccattcccttattgtgctggtacttccgtcttttacatcccagtcatagccgtacgcagggattcccatgatgactttattggctttgatctttttgactgaaaactgcagagagcttttgatccagtttgtgcttgccactgaccccggctcaccccaaatgccgtgttcatcgtaggtcatgacttgtacgaagtcggcatatttgccgattttcgcataatcatacggccagctccagtcatcatttttatcatcggcgcttttggccggaacggataccattgttttaatatgtttcttattcaaagcctgtgagacatattgaatgaagttcgagtatgcagcgcggtcttctggatttactgcttcaaaatcgatattgattccgtaatatgagtgctttttggccagtgtaattaattgatctgtgaatcgttttttcgctgttttattgctcatgacccgactcgctaaatctccgtcaaaatcataaatggcatcattatagtttgaaatgacagcccatgtcttgatttttttctttttcgcatatgtcagctgcttagttggggcatcgccaatgatttgtccgtttttttcaaacgcaaatgtatcggttgcgatggcattcatgtatgtatgatatttcgtaagagaattgtatgaagccgtatccccagtcgtgtagcctactgtcataccggctgccttcgcttctccttttgtatacataaacagaacaatcgcaatcgccagtgaaaccgctatgatcagccattttttcattgcatttcctcctgtatcaagtcatactcttctcatcggccaaaaaattggaagttgaagttttttcaagcaaaaagcccggcatatgcctgccgggcttcctgagttcagcggtcagagacgagaatatatgctgcctttactggtccatgcacccccacaactaaatccatttcaatgtcggctgagttactcggtccggtaatgtagttgatacatgaaggaacagtgacaccgttcgcaatgttttggcggatgatatcactggcttgtgtcattctcggtacaatgcttgatttcggcacgatcgcaatataagtcgttggcaaaaggctgacagagcggccgatgtcttttgaggagaagaggacaaccgtccccgactcagccaatgtaatttcgctgaatgtaatccctacattggcttgctccgcttttttaatattttcctcgcctttgtcagcatcccactcccagaccggcgttccttcactcggccagtccttggtgagcaggcttttcagtccgtattcttcaaagcgggggtccttcggaatgatgacagggcctccagaaaagcggctgacttgctcgcgcagggcatcgtaaaggccggttgaatccgtttcaatcagctctgtatggattttgacgcaatggtttttgagcactgtgactaagtcatccgctgaataaccttcaagtgttttatattgcggctcatacgcccattcagggactgccacgcctcctgttcttctttcacggcccaggctggatgcgattcgatttaaaaagctctcttgattctgaatggttcccttcgtcatcactgctcctccttcgtgcgttcacttgtttctctgtccgcaaaccagtctctgaatctcgatttatgcggtgccgggaagtcacggatctgggtccaatttttaagcgggccgggccctttcgaaattttttcgtcctctgtaaaaggcgtcatggcggccggcgcccattttgagcccattttgtaaagcgataaagaggatgcgccaagtccgaatgctttcattgcaagcttttcactgatcggcgctctgccttctttttcgacgatattctgacgatgcttgagtagcagctcatgaagcgggattttgaccgggcaggcttctgaacaagcagcgcacagtgaagacgcgtacggcagctccttataatcgtcataaccgccgagcaacggcgataaaaccgctccgatcggtcccgagtagattgagccgtatgaatgtccgccgacatggcggtacacaggacagacattgatacaggcggcacagcggatacattgcagcacagactggaattccgttccaaggatattggatcgtccattgtcaacgatgacaagatggaattcttccggaccgtccacttcaccttccagcttcggacccgtcaaagctgtaatataacttgtcagccgctgtccgacagcacttcttgtcagcatgctgacaagcacttcaaattcagaaaatgacgggacaatccgctccattcccatgacggtaatttgtgttgtcggcaaggtgctcacaagccgtccatttccttcattggtcacaaggctgacagaacccgtgtcagcgatggcgaagttacagccggtaatgccgatatccgcttccagaaactttttccggagaatggcgcgcgcatgcatcaccagctcttccggtttttctgtatgttgatagtccagcctttctttaaacacatcgcgtatctgctctttatttttatgaagggcgggcgctacgatatgtgacggcggatcgtgatcatcgatctgcaaaatatactcgccgagatcggtttctacgacttcacagccttccttctccagcacctcattcagattgatttcctctgtgaccattgatttagatttcacaattttcttcccgttcttcttttgaatgacatcacgaatataagaagacgcctcttccgctgtttccgcgaaatagacatgtccgcctcttttcgccacattttcggcaagctgtccgagatagaaatcaaggttttcaaggacatgctgcctgatttcctctgataatgagcgccactcctcccagtttcccagttcttctgctgcctctaggcgccgcgtccgcagacgctcctgtgcacctgaaacagcgcctctcataaattcattatcaatcccctgtgatacccgctctttaaaagcgtcagtaccgattttcatcgccatgatcctttccccctctgaatccagttttatctgctgttgagcacttcggcgatgtgcatcactttgacattcttatcttttcggccaagccgtcccccgatattcatcaaacagccgcagtcagcaccgatcagcacctctgctcccgtttcctccacacattcgactttttcatcgaccatctgctcagaaatctgcgccatcttgacggagaacgttcctccgaatccgcagcagttatgtttgcccggaagctctgtaaactgcaggcccttcacatggctcaacagcttcatcggctcctcccgaacacccagcagcctagtcatatggcacgacgtatgtaaggtcgcttttgtatgaagggtcgcgccgacatcctctactccaaggacgttcacaataaaatctgtcagttcatacgttttatccgccagctttttcgctttatcggcccatttcggatcatcctgaaacaggtgcggatactcccggaacatcgttgtacaggaaccggaaggactgacaacatattcggaatcctgaaacgtttcgatcatccgtttcattgcttttttggcgtcatgtacatagccgctgttgtatgccggctgcccgcagcaaatctgcccttccggaaaatcaacctcgcacccaagccgctccagcagctcaaccgttgcttttccgacatttgtttgaaacatatcaacaagacaagtgacaaaaagtgagactttcatgatgaacccctctctcatccccaatatatgatcaggtcatctgatgacctgagttaaaataactatatgaatatcgtacactattctgacaatggaaggaaagagttttctagggatattttcatttgtggcatatcaaaaacactcccgatctcccaggagtgcagtatatggttaaatccagcccttttcctcagcgatgctggcggcttctgtccgatttttcgcattaagcttttggatgatttctgagatatagtttcgaactgtgccttgagataaatagagctcaagcgtaatgtcttttgttgtcttgcctaaagccgcaagcctcagaatttcttgctctctaacggttagcggattttcgtctcgcatcatattaaacgtcagctcagggctgaagacacgttttccctttacacattttcgaatggcatcggccagatcgtcaatttcgccgtctttcagcagatacccatgtgcaccggcctttacggcgcgttcaaaatatccggggcgggcaaaggtggttaaaataatgaccttgctgacgcagccttttttcattaattcctctgccacatccagcccgcttcgaaccggcatttcaatgtccataatgcatacatccggctccagcttcaaaatagcatgtagcgcctcttccccgttcaatgcttgtccgatgactgtcatatcctcttctaaatcaagcaaggatcccaaagcgcctaaaagcatgcgctggtcctcagcaataaacagacgaatcattcttttcgtcctccaatcattctgcttttttaataagcggaatcgtcagtgccacaaccgttccgttatgatctgaaaccgttaatcccccttcaatgagcatgagccgttcttccattccccacaggccattcccaaacattttctccttcggcgctccctttccgtcatcccgtattacgatcctcattttgtcagcaaattgagaaatggtgatggcacagtgggttgctttgctgtgcttgataatgttagtcacggcttcccgcatacacatactgataatattttgagtgacgggagatatcactgaaaagtcgtcggctccttcgtattgaaaggtaatgttccccgctcttaatatgtgctgaatgtttacgagctcctctgttatcgtgaccgttctcatatcagaaaccagctctcgaacttgcttgagtgcggagcgtgaactggtttccatttcttttgcctcaagcttggtccgttctggatcagatgcagacagccgctgaatgagctggctttttaatgtaagcagcgacagggtgtggccaagagtatcgtgaagatcacgggcgattcgaacacgttcctcccttttagagagttcttttatctgttcgttggcttgtgcaagcttagcttcaagctcaatcctccgaaacatagaacgaattccgaatggagaaatgagcataatgacgagaaacgggagaacagaaaaaagctcccgaagcgagaccgaattcgcgataaattggtataggcatggaaaaagcagtataaagattaaagcgcagaacgcacggttaaaattcgttttctctttgtaataaccaacaaagtttgccggaaaaaaacctaagtatatataggtgatattgtaaaacacactatacatcaaaataaccgccatttgcacgataagccaatatgtaaacgaagctttgcccacgctgcagaataactggcgatatgccgctacaaaaaggagcagcataccatatccgatcccctgtttgacccctgattcttttaataaagagaggaacggcataatcgtatacaccagaaagatataagggaaaaacccgaattccttcgggaaaatagatattgcctttttcatgtattacaccgcttcttgttttcttcttatatatttagatagtagcatgaagagcatcatataagcgattaatatcagaatatttttccaagtcggactcccaccccggacaagttcccacgctccgctcccgaaatgataagacggaagccactggccaatgctctgcatcatgtcaggcatgacctcaaacggcatccacatccctccgcctaaagccagcagcatataaagcacattactgattccggccgctgtttctacttttctcatgaggccgattagtgtgcctaatgctaaaaaaggcaatgcgccaaacaaaatccacagtccgctcatcatccattcaaacggtgacaaggcaatatcattgatgattgcgccgaacagaaatatgacggtaattgataaaacgtgaatgacactttggccgatcatctgagctgataaatagatatgatccggaagaggcgtaaggcggataaaggcggtccagccttgtgaccgctcttgtaccattcggatgccaagcgtcatgatagaggaacccatcacgctgaagactgtcatcgacatcaggtaatgggcttcccatgcacgttgatcagggacgttggtattcactacatttgtaaagaaataataaaaggcaatcggcatgatcagagaccaaagcacaaagtacttgttcctaagcacccttttcatttcagcgatgctttgcttttgcagcacgttcactcacatcgcctccctgttgccgtcagccagctggcgaaatgcctcatcgagcgttgcttgctcaattcgaatatcccgtgcatgtatgttttcttgaaagatcagcgccaacactttgtctgtatttgatgtctggatgatggttctctcatgctcgtggatcactctctcgacttccgggtgacaagacagcctttccaatgattcacttgaatgaagcgtaaaggaaacagactgtttttgaattcttgagcggatttgcattggtgagccgtctgcaacaagctgtccttcagtaaaaaataggattcgctgtgcggcatcatctgcttcctgtaaataatgagttgaaaaaataatcgtttttccttggtccgacagtccgtgaatggtctgccagaatcggtgtcttgatgaagtgtccatgccgactgtcggttcatcaagtataagcagctccgggttcccggcaagagccaaagcaaagctcaaacggcgtttttgtccgccggataatttttctgctcttgttttcaaatcttctttggtgagtgctgttaacgaaacgagttctttcatggacaatggattcggataatagctccggaagagttcaaggatttcatccaccttaaggcccggcatgacacttacttcctgaagcattacacctattttttcacgaacctgttgatcatcgggaacccggttaaatagtttgatttctccctcactcggtttcagcaatcctaatatcatcgagacgacggtcgtcttccctgccccatttggcccgagaatggctgcaatttctcctttttcaatactgaagctgatgtggtttacagcggtttttcgctggaaatgttttgtcacgttgcttactgttactgcttctttcatcacatgagcacctcctgatcgtttacattgattgtaaaatgacggagaagacgatgttagtatggggtgtcatgatgatggagtgacaaatgtcatttttttctcaccccggtgtctaggcaatcctcctcctgcatcttccaattcatccatcttttctatctcccatgtcctctttcttttaaactgctgtgacattcatagaaagatacactcttcaaaccatccgagtgttatgatagaaatattgaactttatattactttccggctgaaaggagccaatcatgaacgaagcgattttgtctagaaatcatgtgaaggtgaaaggcagcggcaaagcatctatcatgttcgcacctggttttggatgcgatcaaagtgtgtggaatgccgtggcacctgcctttgaagaagatcatcgggtgattttgtttgattacgtcggttcgggacattcagatttgcgcgcatatgacctgaatcgttaccagacacttgacggctatgcccaggatgttcttgatgtttgtgaagctttagatctgaaggaaaccgtgtttgtgggtcactccgtcggggccttgattgggatgattgcatccatccgccgcccggagcttttttccaatctggtgatggtggggccttctccttgctatttgaatgatccgcctgagtattacggaggatttgaagaggagcagctccttggcttgctggagatgatggagaaaaattatatcggctgggcaactgtatttgcggcaaccgttctgaatcagccagatcggcctgaaattaaggaagagcttgaaagccgtttttgttctactgatcctgtcattgcccgccaattcgcgaaagcggcgtttttttctgatcaccgagaggatctttcgaaggtaacggttccctctcttattctccaatgtgcagatgatatcatcgcacctgcaacagtaggtaagtatatgcatcagcatctgccttatagcagtctgaaacaaatggaggctcgcggacattgccctcatatgagccatccagatgagacgatacagctgatcggcgattatttaaaagcacacgtgtgatataggaacgaaagggatagaggtgaccctcttagatggacaaacaattgaatgatgcaccatgcggtttcctcgctttgtcagaagaggggtcgatcatagctgccaaccgcacccttatcaagattctggattatgagccggagcaggttatcggccagcatatgaatatgatgttgacaattcccgcacagcttttctgccagctttatttttttccgcttttgaaattggagcatcacatcgaagaaatatacatttccctgaaagctagagatggagaagaaattcccgtccttatcaatgctattgcgagacacgatagcggggcttctgtctttgattgtgttctgattccaatgcgaaagcgaaatgaatatgaaaatgagctgctgatagccagaaatgaggctcaggaagctttgcttgccaaacagaaagccaatgcggagttagagattgccttggaaacgctgaaagcaaaacaagaagaacttcttgagatcaataaacaaaatcaacaatttaaattaaacaccaaaagagagcttgaactcgccagaaagatccagaaaaactcgttgactgaaccgattgtaaacgatcaggttcagattgactcttattacaacgcatcgagtgaattgtcaggtgatctttacggatattatcaaatcgatgaacaccgttacggcattattatccttgatgtgatggggcacggaatttcatctgcattgattacgatgtctcttcatcctttgttccagcgccagatcacgcaaggtctcagccccgttaaagttatgaaggaattggaccggcaccttcacagcttgtttcaaaatgatgaggaagcaagacattattgcactgctatttatctcgagattgacatagcacggcaaagaattgattatgtcaacgcaggacatccgccggcactttggcaggacgatagcggaactcaacatctgcttcacgcgacttcgcctccgatcggaatgtttgaagacttagtatttcagtcaagcagcctttcatacacggagggcggaagattgcttctgtatacggatggcgtgatggatcctacggcttcatgttatttatatgatttactaaaggatcatcctgattcgccgatcgctgaccagaaggagaaaatccttacatcactgcagcatcaaaaggaagctcatcataagagtgatgacgaatgttttatattagttgatgtaaaataaaatgatccatgagacataacaatgatttgttacatctcatggattttttgtttcagcgtttctttggaatatgtcctgactccgcatattgaaacacctgcaaggaaggcagcgggtgtccattaaaatcaaataaagcttgattatctacagcacttcccccataccacttcccggcgtcttcagggtcgtattcagcagcatagctggacgcccaccctgacccgtatgtttcccataacactttgtttttctctatctgtgttttcggtccgaccggaatccacgcaggctcccagtagaaaacaccaagtcctgctttgcccgtattcgccactgcctccattacatctcttactgcagttgcctggccttgaacagaaattggatatggcagcgtctgcccgctttttggtgctgtatttccatgcccatcgccatcctcggcggtataggtgtacgatgtctccgccaccatgacttttttgccgtacgtgttggcaacagccttcagcacggaggtcaaattttgtaatgtgccatgccagaaaggataataggagctcgcaaacacatcataatccactttgtttttgctgagtgtttccgcaataaatgaataccttccagccgtttcaggattggtaaaatgcagggcgaccaaaatatttgaatttgtctccctgaccgctcggcttccttcattaaataattggcacatcttcgtccaatcagtctcaccggcaaatcctcctgttgtttcatttccgacctgaaccatgccgatgtcaacgccttccttgatcatcttttgcaggctttgtttcgtatactcatagagctttgctttttttgcttcaaagctgagattcacccaggctttgggcaccttttgtttcgctggatcggcccagaaatcagagtagtgaaagtcggccagcaccttcattccgttcgctgtcgctctttttccgatttcgatggctttttgaacatcattgtttcccccgccatacccgttgccatttgaatcatacgggttattccagatgcggacgcgaacatagttgaccccagcctgttttaaggttgtaaagatgtcctgacgttttccgcttgtattataaaaggtgacaccgctgttttccaaagcaataacgctggacacatctgcccctttgataaaatccttgttcatcccctctacttttttaacaaaaagatcctctgtccgaagctctgacacgtgcttgtccttctcaatggcagcggcatatcctgttgaactacatgcactccacacgatggcagccgcaaagaacattttcactttgcttttcatgatttcatccccccaagacttagtaagcagtttcattctatagaaaaaagaatccgcccatatcgagcggagcatcagcctaatgtgtgtttacgacaattctcacttcatacttttccatcgtcaggtcgcctgacaatatgtctcctgtcattatgtccttcacactctgatcaaacgtgaccagttgtttttcttccgtaaagttcatcacaaaaatataatcattgtcctgatcctgcctcgcttgtacggagacgccttttccgtgccgaaccggaaaaactggagaaagagacaggtctgtgatcagaccctcatagaaatcacgctgaaattgatcctccaaacgcgcgccgataaaatacgccttgccctgctgatactcatggcttgtgaccgctggcgtgcgcgcataaaaatcttcttgatacactgcttccactgaagctgtctttacatcaatcacggttgcataatccttcatttcatatatttggctgcgatagctgacagcgtttcgatccttcggatacagggtgtccgtttcaagaggctcaactccaaatatagcttgaaggtccggatgccatccgcctgtgtatgttaagtcatgctcattcacaaccccgctgatatacgtcatgactaaggtgccgccgtcagccgtaaacgcttttaaacgggaaatggtgtcctcgctgattaaatacagcatcgggacgatcagcagtttatatggtgaaaagtcttgttctttcgtgatgacgtcgacagggatatcgtgttcccagaatgtgcggtaatgctgctgaagcgtttgcggataacgttttgtcgccttcgcaaacccctgagcatcctcgagcgcccaatgattttcccagtcatataaaatcgcggtttgagccggcctcttcgttccgacaacttcggacagccgttccaatgtctcgcctaccttggccacttcttgaaagacgcggttctttgggctattgtcatgatccacaaccgctccgtgtaatttttctgatgacccccgtgatttgcggtattggaaatagagtacgctgtccgagccgtgggcaatcatttgcatggatgacagcagattcatgcccgggcgcttcgccttgttgacgttatgccaattgaccgcgcttggcgtacactccattaataagaaagactgctgcttcaagcttcggtacaggtcgttgataaaaccgaccttcatcgctaaatcagctgtgctttcccagtcattgtgccagacaggataagcgtcccagctgatgacatcgacatgctttgcaaatttgctgtagtcgaggccctgatacgggatcaaatccggtgtgtcagccataaaattcgttgtgatagggatatcaggcgtcagttctttcagcggaatgatttcatttttataaaacgaaatcgtttgatcggtgacgaaccggcgccaatctaaattcaggccatgcaagccattttcaccgatcggcgaagggctttcaatttgtgaccagtcattgaacgtatggctccaaaaaggagtccaccacgcatggttcaatgccttgaggctgttgtcatatttcgatttcagccactcccggaaagcatgctggcataaatcacagtggcaatctcccccgtattcgtttgaaatgtgccacattaacagcgccgggtgatgtccgtatcgttctgctaataagcggttgatgtgccgtgttttttctcggtagactttagatgtgaggcagtggttgtgccttccgccgtgcagctgtttgacgcgggaggcattgacgcgcaaaacttccggataggtttgcgacagccaggccggacgggctccgctcggcgttgctaatatgacccggccgcctatactgtgaatccgctcaaaaatatcatccagccattcaaattgatatacaccctcctccggctcaagtgcgctccatgcaaaaatgccgacagaaaacgtattcgtatgagaaagcttcatcagtttgatatcgtcagctaaaatatcgggccgatccagccactgatcggggttgtagtctcccccatggagcataaatttcgcttcggttacgtgcgttttttcaagctttgacatcacattctcctcctttttctcttagcccttcgttccgcctgcggttaatccggacacaaaattcttttgcagcatgataaagatgagggcaaccggtatgctgataagcagggctccggccgcaaatgtcgtatagctggcccccatgacatcattcactaaattgaatagaccgacgggcaatgtatatgattcaggcgttctcaatatggttgaggacagcacaaaatctccgagcggaccggtaaagccgttcatggccacgactgccgccatcggttttgataatggcagaatgatctggaagaagattctggtgctgctggctccgtcaatcttggcgctttcgtctaaatccatcggaatggaatccatgtaccctttcatcaaatacgtattcatcgggatcaggccgccgatataaagcaagattagcagccagtggctattgatcattcccaagatttgcgccagcacaaacaaggcaattaaagccgaaaactgaggaatcatctgcagcaataaaaagagcgttaaagcgtatttcctgcctttgaagcgaaagcgcgaaaacgcataggctgtaaacgtcacacagagcaaagaccctgccattgtaaacaggctgatcttcattgagttgacataccactgcacatattgaaggctttctttgcccgcaaataattccttgtaatggtcgaatgtcggatgcttcggaatgatggatgtactgattaagctgttgccagggttaaagcttgcgcctgccgtccaaaggagaggataaacaatgatgaccgccataaaggctagcaacaagtaagagaaaaggagacggatatattttctgactttcatatctgccagcataccttatgccccctctttaaaagactttgtctgtctgaattgccacaatgcgatggagataacaaatacagataataaaatggttaaagccgcagcaagagaatattggctggactgcattgtcaatttataaatccatgaaacgaggatatctgtcccgccggctgttgatccggttacagccggacctccgccattgaatagatagataatattaaagttattaaaattaaacgtaaactgggtaatgataatcggagccattgcaatgaacaccatcggaagcgtgatgtatctcagctttgaaaagacagaagcgccatcaatcgtagctgcttcatacagatcgtccgggatggattgcaatacgcctgttgagacgagaaagatgtacggaaatccgagccagccctgcatgagaatcaacgcaagcctcgaccaattggcatctgtcatccacggaagcggatctatcccgaagaaagccaagatgtcgtgattcatcgcaccgaagctatcattaaacagtcccgcaaaaattaaaatcgtcacaaaaccgggaacggcccatggcaaaatcagaatcgtccgaaaaaaacgtttaaaccgaaggtctttctggttaacaatgatcgcgagaaaaatccccaagctgacttgcagtgtggatgcagcaagtgtccaaaccaccgtccaagccagtacatcaaaaaaagtcgacctccaaatatcaactgtgaaaatatttgcgaacgtttgaaaaccgacccaatcaattaattttgcaggaggagaatgatacaaatcatagtttgtaaacgctaatgcaaagctgaataagataggaaagatcacggcgaaaattaaaataaacaaagaggggccgctgacgacataaggatagccctcagaaatgatatgttggtattgttcctttaaggaacttaatggcttattttcatcacgctgttttccgctttggaacgcatcgcgaagattcacataatacaccgcaaggccaaagcaggtcacgatgacagcgataattccttccgccagcagaaaaacggaattatcccgcggcacttctgttcccagtgtaaagattccccaaaaccccatattgagcagatctccaaagaccgcaaaaaacgatgcgcctaagaaaagaaagacaataccttttatccattgcttgttataaaattgcccgagtcccggaatgatagaaagcaacaaagcgacttgacgatgctgcaccgttttcacctctcttacaatacaaatctagctttctctttattttccgctgtgctttgccttaatttgtcctttggccgtttcagctgcttgatccaatgcttgtttcggatctgccttccctgttgcaaccgtctgtaatgctgaatcagccggcgtccatatttcattcatttccggaatatttggtgttggctctgagaaacgggattgttcagtaacagcccgtgccgcctcgcttttcataatagccgggtcattggctagggatttcacagcaggaacttctttcgtttcttcatatcgtgttttagaatttttttcatttgccaggaaaacggctaattcttgcgccagttcttcattctttgtaaatgcactaacgttgtagcttttgacgccgataaaggagctcatgtttttcctattttccagcttcggcagtttcgtaatgccataattgattcctgctttcgaaaaagcttctacattccatggaccagaaataattgcggcggcttttccttctgtgaacagcgattccaatacgttaatcccttgttctccaataatgccagccgggaacaggccatctttgtaaaacttctgaatcagcgccgcacctttgacagctccttcattattgattccaatgtctgacgggttatagctcccatctttgtcctttccaaaaatgtatccgccatatccgctcatcacactttctgcataataaatttgatcgaatagggctaaaaagccaaaattgctgccatcagctgtctttttggaatagtcgtaccactcttccagcgttttgggcaattccttttctgtgatgagatctttgttgtaaaaaagcacagtcgtttcgaccgcttttggcagtccataaagcttttgatctaccatttgagactgaatggaagcgtcagtataaagtgattgaacgtcttttttgacatgtaattccttgagtaatccttccgtgacagcggttccgatttggtcccctggcattgttaacacgtcagggcctgtgccggccggtccgtccattcgcaaatcttcaatctgcttggcatacggtttttcaacgactttgaccttcacatcatgctctttttcaaacgcagcaacggcgtctttaatgccgatgctcttttctttatcctcccatacaacaagctctgacccttttgaactcgatttggcgctgctgctttcctttgggccgcaagccgccaaggataaactgacagctgcgcagagcatgaatacggaacacttttttgccattttcattgattgtcaccctttcggtaggaatgaaagcgctttaaagataatatagcacgcttgagaaaatgtgtaaacaaactatttacctcatagagtaaatttttttacttaaataaaaatgacttagtgtcctaagtcattcttaattcatactcttcctgacgattaattctgcgcccacatataatgtttttaccgttcttctcttgtcctgcacttgttcaagcagtaattgaacagcgtttttacataattcatgtatatcaatatgaaacgtcgtcagaggaggcgagacatacttcgcgaagctgatgttgttgatactcacaatgcttaccctgtttggtatagcaattcctttttcgttcagggcttgcagacagcccactgctatcgggtccgctgcaatcataaaagcagtcggaagctgatcgcctaatgtgtcgatcgctgctgacatcaggcggtagccgttttctacagagaatccgcgatgacagaaaatatagcgctcgtccagcatggctttttccctcatataggatctgaaggtttgttcacggatgtccatttcatcctgattggtattcggatttttgtatgtgccgccgataaaaccgatgctcttatgccccttctcagccaggatgtttaccgtcttccttgtcatttgtgccaaatcgggccttaccgagtcaaaatgatcgggatcaggagttgaatcgatgaacacgccgttttcagtgagatttctgaggaaagccagctcttcatctgaaaatgtgccgacggcaataaacccttccgtatgttcaggaatgctctcgattccatccgctattttataagtggtcatatcgacattgaatgctttcgccagtttctctacttctaatctcatcgttttaaaatagacatcttctaattcttctttatctgtcagccaatataaaaacgcaatatgtttcaccagcggccttactgtttttttgcggtaattgagcttttccgccgcttcatagattttctcccgtgtttcatcaggaacagaaaggctttcatcgttatttaaaacgcgggaaacggttgagattgaaaatcccgcttcctgcgcgatatctttaattgtcgccattgcatctgcctccattattcagctcgcattgttttagtaaaatattttactttctttttcgcaaatgtcaagtgcacaaagccctctggctgcctcatgtaaaaagactgaaccatttgcggctcagtctcagttgttcgtatcattcggaaccggcggaattgcccgggaaatgagttggttattgcacattttcctcgaaatatcccgaaagcacatcttccacattcgtcaaatgcgccagcatggcggcttccgcctctgcaccgttcccggcagccacagcattgtaaatccgttcgtgctcctcatacagccgctgaacggaggtcttcttggaaaacagccagattttcctcgtttccctcattgtttccagcagcaatgatgacacgtgattcatcaagtgtttaagaagttcattttgagaagcgtccgcaagcgcaagatgaaatgcaaagtctgctttctctcccagctccccgtccgcttcaatgctgcccatttccttcagggcatcatgaattctttcgagatctgcttctgtccttttttcagccgctagtgaagccacgccgatttcaagcagttttctgacctcgagcagctgcttgacgtcctcttttttcatcagaagggcggctgagagcggctgagaaatttgattgagctcaaattccttcagatacgtgccttctccctgtttcatttcgacaagccccatcgcttttagcgcagaaagtgcctcgcgaaccgctgaacggctgacttgaaagctctcagcaagcgcctgaacagagtccagtttatcccccggcttcaattcgccgtttttgatcatatctaatagtgcatccgctacttcttcatatattttttttgttttaatctgtttgtatttcaatgcaattcaccccgtaacttgtaggtctggctgtttacgatctattatactctgttttgtgggccgccaaaagattttgactattttgtcaaaaagtcttgtactttgatttttttcaaaatataatgctaggtaactggtcttattacccagtcatcagatgatcatatcatctatagaaaccgcttacatatggcgccagtttatgtttcaaggaggggtttgggatgcaatggacacaggcatatacgcctatagggggaaatttgctattatcagcgcttgccgcacttgtaccgattattttctttttttgggcactcgcgattaaacggatgaaggggtatacagcaggcttggccacattggggatcgcccttatcattgctgtattggtttatcggatgccggcggaaaaagcgctgatgtccgcgacacaaggagccgtatacggattgttgccgatcggctggatcattgtgacgtctgtttttttgtataaaatcactgtgaaaacgggacagtttgatatcattcgcagctctgttctctcaattactgatgaccgacggcttcaagctctcttgatcgctttttcattcggggcttttttagaaggggcagcaggcttcggagcgccggtcgccatttctgccgcgctgctggtcggtctcggctttaatcctctttatgctgcggggatctgtttgatcgccaatacggcgccggttgcctttggggcaattgggattccaattacagccgtagaagggccgacagggattccggcgatggagatttcgcaaatggtcgggcggcagctgccgtttttatccgtatttattcctctttatttaatcatcatcatgagcgggttcaggaaagccttggagatctggccggcgattctcgtatctggtgtttcctttgccgttgttcaatatctcagttccaattttttagggcctgagctgcccgatgttttgtcagctcttgtttcaatggctgcgcttgctgtgtttttgagatggtggacgccgaaaacaacattccggtttgccggtgaacaagagtcggccgcctcaattgaaacggcgcgcacaaatccggcggcgcctgcgtacagcggcggacagatttttaaggcttggtcgccatttctgctgctgacggcgatgatttccgtatggggcattccatctgtcaaatccgcgctgaccgggcattatgaaggctctgcggtgttcttaaagtggctgaatgctgttggagaaaaactgactttttccccaggtgtgccttttttgaacaatcagattgtcaatgctgacggtacaccgattgaagcggtttacaagttggaggtgcttggttcggccggcaccgcgattttgattgccgcagtgctgtcaaagttcatcacggcgatttcatggaaagactggggaaccgtttttaaagaaacagtccaagaattgaagcttccgattttgaccattgcttctgtcgttggttttgcctatgtcaccaactcctcgggaatgagcacgacactcgggatgacactcgcgctgacaggttcgatgtttaccttctttgcgcccgttctcggctggctcggcgtcttcattaccggctcggatacttccgccaacctgctgttcggcaacctgcagaaagtcaccgcattatcagtcggcatggaccccgttctgtctgtggccgccaactcttcaggcggtgtcacaggaaaaatgatttcaccgcagtcgatagcggtggcgtgcgccgcggtaggactcgccggaaaggagtcagatcttttccgctttaccattaaacacagtctgtttttgctgctgctcgtttgtatcatcacctttttgcagcatcacgtattcagctggatgattccttaaaaaaatcctcccgtctagggaggattttatttatatcgctttctcgctgccgatgacggaatattcatttgatcgcgatattttgccacggtgcgtctcgagatttggatgccgtgttgttcatacagcaaatcgacaagcttttgatctgaaagcggttttgttttgtcctcttgattgatcaggtcttcaagatgcattttgactgcataattcgacgcatctccctctcctgaagcctcggcttttgctgagaaaaagagcttcatctcaaacagcccgtaaggcgtttgtattgttttccctttaatggcccggctcacagttgattcatgaaggcttagacagtccgccacctctctcagagtcagcggcttcattgcgcttcgccctttcagaaagaaatccttttggcgtgtgatcagttcattgataattctcgtgattgtctgttttcgctgcctcagcgcgcggctcagccagcgccactcctgatatttcgcagataaataggagacagtatcctgacaggagccggatgataaaagcgttctgtactgcggatgcagatcgatctcgggaaacgagcgggtattcagttccgctgcgatgtgcccgttttttacagtgataaaaatgtcaggctcaatatacacatcttgctctggccgggcaaacagaaggccaggtctaggatgaagagccgcgatatcatctgagatatcttgaatagtatgaagcggaattcctgcctccactgaaagcgctttccattttttttgcgcaaaagcatcaaaatgagctgaaaccagcatttccgcttgttcatttctgttcggcagccgctgtaattgaagaaggatgcattcctgcaaagatctcgcgccaattccagccggttctaatgactggagttttgccaaaacagcctccgcttccttggccgatacagataatcgccgtgctgcctcctctatatcttcttccaagtacccgtttgaatcaagcgaatgaatcagataattaaaaatctttttttcagtgtttgtcagattcatatcgagtgactgctgttttaacgcatcctgcaatgttttttgcggattacttaattgaaggcccgcttcctgtgcattcatcctgtttttgtttgttttatggtaagatagtggcggtgtgtctgtttcctttcgttcaataagagggttttccagtgagagctcatcaatgtactcggcgagttctgccgaatgatagccaagcagcgtgatggcctgcctgagctcctgtgtcagttgaggctttaatacttgtacttgctgaagtttcatatccatcttgctcactcccctttcttcattgtacatgattgagatcacaccgtatacatttatgaaaaaggagctgccaaagaaatgtctgaacttttttccgtcccttattttattgagaatttaaaacagcatattgaaatgaatcagtctgaggataaaatccacgcgatgaacagctactaccgttccgtcgtctcaacactagtgcaggaccagctgacgaaaaacgcagttgtcctgaaacggattcagcatttagatgaagcatacaacaaagtcaaacgtggagaatcaaaataaaccttccgctcacatgtgagcaggaaggttttccttctttgaggcgtgctggatgagacgggtgcttggcacgccttccatccaggtatgaaagtaattggcgtttttcccgtaggaattatcaatgaccgtgttttctttttgaagaagagaagacaggatgtggccgtgcaacctcgatgtttccaccgattcgtaacggctgaaaaaccgaatcgctttttggacgatataatccgagtatttttcccatatatacgcaatgggcaaagggttgcctgcttttttattcaagacgttcagcgtttggagaaaagcaatcgtccggcggtctgaagctgacagcaccgtgcgccagtcgtagctttccgcttctgcgtgtccctgaagcgcctggtttgcttcatgatctgttcggataaatctcagtttttgattggacggctgctgcgtgggaatgacgggaaacagctgatgaaccatatcaggcagaagctgaatgtgatttcttgaaaaataagcctgtgccgtagcataggaggctttttcccttgtcataatgtgaaggttcgcatgcttagaaaatatctctgccgtccgtttgaggttgtctttgttttgaaaataaatcgattgcggcaggatcacaattttgtggttcggataggtttggacgattttctctctaaagccttgataatacggatacagatccccgaagtttccgcctccctggcagacgatgatgagatgaggatccagctttcgcccgactggaaaattgtcaggattccagcgttttctgacccgaatcccgtgttctttaaagaaggcttctgttcctttcataataaataaatcccctacattcccatatagaggatagtcagcatatataatctctgattgtttcggtatgacgtcgagcagcccggacagtttctgtttcaggctgatcatcgaatgcttgctgtccatttcttcacctcggcagtttggaataagtgcagtagcacttcaatgacccggtcttgctcatcttctgtcatattggaccccgatgggagacagattcctcgcttgaacaaatcttcgcatacgcttcctgtatcttcatgagaataaaataaagccggatcgaatagcggctgggtatggagcggcttccacagcggacgagcttcaatgttttcttcagcaagacgttgaactacgtcatatgggctgagcccgttatcaagtgtgagcgtggtgagccagcgattggatacgcctgctgcgtactccggcataaagcggacgccgtctatgtgaccgagcgcattgttgtatctcgtgaaaatggtccttcttttctccactcgctcatccagcacctcaagctgggcaatgccgacgccggctaagatattgctcagcctgtaattatgaccaatttgactgtgttgataatgaacagccggctctcgtgcctgcgaagcgagaaatcttgctttttcaattgctgcttcatcatttgaaacgagcatccctccccctgatgtggtaatgattttattcccgttaaatgaaaaaatgccgaagcgcccgaaagttccgctttgcttccctttatagactgtgccgagagattcggctgcgtcctcaatgacaggaactccgtatgcatcacacaggcttacgatttcatccattttcgcgctctgcccatacagattgacggcaatcaccgcttttggcagtgttccatttcttttcacttcctccaatgctctttcaagggctgtcggcgacatattccacgtatcaggctcagaatcaataaagacgggcaccgctttttcatatagaatcggattggcggttgctacaaatgtgaaggactggcaaaacacgctgtcaccttcttttacctcaagtaaacgcagcgcgagatgaatcgccgccgttcctgagctgaccgcagctgctgcttttacaccgactcgttctgccagctgttcttcaaatgaattcacgagcggcccaagcggcgcgatccagtttgagcgaaaggcttctgaaatatagtgctgctccctgccgctcatatgagggggagataagtagatttttttatgcatagaatcatcctttgtttgatgtttgaatggaagaaatgatgcgtgccggagcaccggccgccgttaccctgtccggtatgggacggatcaccgcggagccggcgccgacaatgctccaagccccgattgtgatctgcggtatgacggatgcaccggttccgacgtgagccccttcctgaacggaaaccgctcctgacagcgtggcacgcggagacagatggacataatcgctgatctgattgtcgtgctctgccactgcacccgtattgatgatgcaatgagcgccgatgcgcacatccgcctgaatgatcgcgcccgccataatcactgtcccttccccgatgacagccgacttgctgacgatggctgacgggtgaatcaatgtaataaaatcatctttcctcagacccagtcgctccgccagctgttttctgacactgttattcccaacagcaatcagaaacagcacatcaggaatgagcctgcgcagttcagtaacggcttccggcggtcctgtgtaccattcttttccgccttcgaatgttttgaatttatcatccagcaccgcggctaagcgcgtatctgagcgggcgtttatcagctccctgatcacctttccatgaccgccgtcacccacaatggccacgtttttcatgaggacacatctccgcttccggtaaaccgttccgcggtcacatgattggtttgctgaatcccttctgaaacaaggacctttcgcaccgtcaaacataaaattttcaaatcgagaaaaaatgaccggttgtcaacgtaccaaacatctaattcaaatttcttttcccaggaaatcgcgtttctgccattgatttgcgcccagcctgtgatacccggcttcacctcatggcgccgtgcctgtttttctgtataaagaggcagatagtccatcaaaagcggccgcggcccgacaaggctcagatcgcccttcaggacattcaggagctgcggaagctcatcaatgcttagctttctgatcagcctgcccgttttcgtcagccggacttcatcgggcagcagatttccctcactgtcccgttcatccgtcattgtccggaacttgtatagggtgaacggtttgccgtgcaggcctggccttacttgcttaaagaagacaggtgatcctattttcagcctgacaacggcgatggtgaacagaatgatcacactcgtacagcacaacaaaaaaatggcggccgtcagatcaaaaagtcgtttcaggatcaaagattcacagctcctttcgtttttcgaaaccgttttagtaccagctgtctttcctcttttgtacaaacgagcataaaagcgaaaacagcgtagcaaaagctgactgtcactcccgtcgctatcagtgacggccatccgtcaaccttcacaacgaactgaattgccttacagaccgtccaggcaaacacagcggctgatagaggcccgattatgcctttaaagaaaacgtgctttttgtagcctgtaatgcgggatacataaagcggcgtaaagatggcattttttaaaataagagaaatggcccctgccaacgttatgccgtacagaccgagatgagccggcccgctcagcgtgaccgccagcaccacattcaccgcacctaacagcagggtaacaatcgccggtgttttttgttgattaaaagcggtccatatataaaacagcggcataaaggcgaggctgacaaccaagtatccggcatgaataaataaaagcggtgctatcgttgaaaaggacggtccgagccagattgtcaaaaaaggtcccgccaatccgcccaataaggcagcaggaagtgcaagcaaaagaccattgagccttactgccttattggcgtaattcatcaacccttccatatcgccttttgaataatatgaagtcatgataggcgcaaacagggatgcgaccgttccggccaagctgcgcaaaagcagcggaaactggataatcgccgcgtatttcccggatgcggacgcccccagcatcaaattggcggttaacagatcaatctgcaaaaaaagcaggacgccgatttgattgacggagctccatgcgcccgcttgaaacagctccttgcttgtgcggaatgaaagatccttcatacgaaacgaaaaccacggaatcagctttttgaagaaatagaaagacagcacagacgcaatgacagcaccagctaaagctgcaagctggatctgccagattttcggcgcaaagcatgcaaacaggagcagcacagacagcacccgtataagcatttgcaccgcctgaatggaactggtgatataaaggcggttggcataaaatggtgcagcaccgaaacccgccatcagaaacgttaaaataaacagcacactgccgattaaaatcgacaaacgcacatctgccaaaagcgcttgcggcacattcatgacgcggtcaataaaaaaagccgaacccgcaagcggcagcaagagcagcaatgaaatcaaaacagaggccgctaaataattgctgatatacgcatttgctttctcccgctctcccctgtgggcagcaacagaaaagaaccgaacgacaaccgagctgagcgccacggtaataaccgaaaagtaattaatcacattttgtgtcaagtgaacaaagccaaacgcttcgacaccgagcgttttgacaataaaaggcgtcatccaaaccgataggaaaacagacaagagaaaagccgtgagattcgcgctgaaatttatcgtgaatttcatgcctgcttcgcactgcctttcattgtcccccgctgctcgaaaaacagcttgatgagaaaagtgagccgccatttacacagtgctaataccaaacgctctcctcttaataatttctcatgctgaaacggtgtatgtctgacagcctgccgcaccatgtcataggataaaatctgtctgatcttctttttgatgtctttcggcgaattcggagaagcacaggcatttgccaaaagcatcggaagctggtgcctgcaaatgtacacattcaaatcttcttggcatgcgcctgctaagccatagtgattgtagaatgcgattttagcttgatattgtttttgaagatgttcatccatcgccggcttataagggatttctgtcaggctgttcgggttttcacgataaatgtacaatccttcatcaagcattttcacccgctccgcttcgcaaaaagcggacaaattgaagggagagtcttcagcaaaacggatgtcttcagcaaacagcagattcgccctatcaaaaagctcacggcggtaaagataacgccatacataccagataaatctcgtttcgtgagcatgtttaagctgttcagtcatttctcgttttgtcagcacgcggtttgcctcaagctgcggcggcacatatgtccgcctgtccgatgactgtttgtaaaaaccgcatccgacgatgtcgagccgattttcctccgcttcttcagccagcctctggaacatggcggaaaatacataatcgtctccgtctacaaagccgatgtaagtgccccgcgcggcctttattcccgtatttcgcgctgaactaagcccgccgtttgcctgatgaatgacccggattctcgcatcccgttttgcataatcctctgcaattttgcctgaacgatccggtgttccgtcattcacgaggatgatttcaatatcagaaagcgtttgacgaagcaaagaatcaatgcactcccctataaatggttcaacattatacatcgggacaataatgctgacgagcggggtcattgcgcttcaccgctgattttgtcacgcagacctttaaaatacacatctctcggaaagcctgcacgggatgtttcttttgttaaaagctcattgactgcggctgttacgcgctctggctccggatgttctatcagcttcatgaacgggatgtctttaagccattgatagccctccatcaccttatggtcaaaggagcgaatgacaacacacggcgttcctgtcagcgcgcaaaaaatcatgccatgaagcctgtcagtgacgacggcttctgcgctttgcagcttagaccacagtgcttcaagttcttgttcgcgtgtatcgcggctgacccggcggccgatcgttgtcgtaaaggatttgatctcgccgaattcctcacatagcgcagccttgacccggttcctctggtcctcctgaagcacgctttcctgatcctcgcgcaaacacatataaaccccttcgcgttctgcgggggtcttgcttctatctaaatacagcaccatgtccggctgcttcaaaattgttttttcttgaaaatgctgtttcataaattgatacgttgtttcatcccgcgccatcagcaacaggccggggtgcgcattataaattttctgtgcccgtttcagctctttgcgcccttttttcgtgtcagaaaaatgagccgttgccggaagctggacaacccgatagtcatggaatgttttaatgatgaagcggcgcgtccactcctcataacggtataaatcccccatatttccgccgccgatgataaagaccatatcctccggatggcgcgagcggatcaggttttttgctgatttgtaaatgtccttcatatcgacctcgacgatgtcaaagtccgggtattcttgctcaagaaatgccttgctggcataagcaattgcgtgatctcccaaattgtcatgggacggcagcagggtcagtatgatttttttctgatgtgctgcggcctttaccggttgatctgccgctcccagccaatattgggacgggtatttgacctttagcagcagccattctgcaaaattgattttcaacgattgtaacgacatgtcctcaccctctgtttctcattttgtactcgatcacccgctgatacatagccgatgccatagcgacgaacggaatcattctgtatttcgccatcagaagcaggcatgaccgttttgcgtcaaaaggagcggtacccgtttttgaaagactttcttgaaacaccgggtccgcgcatatcacgccaacatttctaagcttttcaaacagtcggcggctgccgctcgttttccattcattcagcatgcagatgctgctgtgaagaacgataaaggtatcaagctccttgcgatactcctccagtttgttgttctcctgtaaaaacgccgcattcgcctcatacagcgcaagtcctgattcaaacaattttttctgatagcgctgcacaatggaggaaaggtgaattcggtaatgatagagcggcgtttttacgtaggatactgagcgggcgaaaaaatgagccctgaagctgaaaaactgatcctcgacatgctccagctcgcctcggagcggaaacgacagccgatgggcttcaatcatgcttcttctgtacagtttgttccatgaaaaccctctgaccttcccttcgaataatgccttgatatagtgctccttcggctgatcctgataggtttgggcaatgtctgagtccatggttttgccagtgtcctcaaactctgcggcgtaattgcaaatgaccagatcagtttcatcgcctgctgcccggagcatctgctcgcaataatcaggttcgatccaatcgtctgaatcgataaacgcgataaattcgccgcgtgccgcttcaatgcctttattccgaaccgcaccgagtccctggttttcctgatgaatcaccttgaacctgttgtccattttggcgtattcttctgcgatatccgggctggcgtcagctgaaccgtcattgacaatgatgatttcaatattgtccactgtctggttccgcagtgattcgagacacgttctgatatatgtttctgtgttataaacagcgactaacagactaaccgcaggtgtttccataatgaccggctcctcgtgcataaattaccgggaaaaaatcgttctgtaaggcagaaccgatgaatcaaccggcataagcaaataactgtaaagaaaataacaaacaacgatagcgatatagataagggcgttcgatttttcatcaaatatcctgacaaaataagggactaagatcatttgatacagaccgaaataaatattgaatctggcaaaaatcacgtcctttgtggccaaaaggccgaacaaaaaaccaagcaggcacaaattgacgacaatatcgatttgcggccacagactccgcaatcgttctttatagcaaaatgcaaggaacagcggcagaaccaaaacagcgattttgatcacattcattccatttgtgttcgtcatgagccatttttcataatggctgtatgagctgttttcaagtacaacgacaaacacagaaataaatttttgatataaaaatgtcatgccgagaaataaagcggataggccgaatatcgccggagaccaggcttttcttctgacaataaagtacaccggaatcataatcagcgccgacgaatgaaagagcgagctgacgagcacaatcaggaaatatcgcttccagttcccgctgatgatataacggatcgcccaaaacaaagcagctgccaccatgtattgcctgatgccgttaaaagacgcgtagtaatgaaaggttcccaaaaacaaaaagacactcagctcaaacggcctgccatagtcggcgagtgtcttcataataaagctgtaggtcacgaccgccaccgtaaaatacatgatttgaggatcttccgtgatgaaattcatcagccaaaggagtgcggtaaaccccggatctgtcgctgttttcgctgtgccgaaaccgaatatctgccacacattttgataatcgcccgccaattcgtacagcagcgtgtacgtctgaaaatccgtgccgactcgatagcggagacctgacacgagcacaagtgaagcgagcggaatccagatcaaaagcttattcggccgataccccgtggcaagcgaatcgtcacggccgccgcacattttagcgaaccaagaccaaataaatacaatccccatattgacggcatatacaatcatcggttatggtccttttccgtgctgatgttgtatacattcagcagcgctcctacattttgctgtgcatcgtagccaagttgagcgagtgtttctttgatgaactcacgcttcggcctgcctgcggcggccgcccttgcaatggtttcagcccagacgctgatcggttcagaaagacttaatcttgtgacaagcccgagaccggcgtcgactttttctgtaatgctgcctgaaatgatgcatggaagccccgacgcctgcgcttccacaagcacaaccggcaagccttcgtacagagacggcatgacaaacacatcaaatgtgcgcatcaattcatggatccgttcttcagtgcctaaaaagagaacatctgatagcagattctgccggcgcgcctcctcctctatctccccgcgcaacggcccgtctcccgccagaacgagctgaaagcgaacgcctctttccttgagatgtgcggcaagcttcagcaggaacgcgtggtttttcacttcatgaaaccgggccacatggccgatgatgagccggtcggctgcaatgccgcgtgctgctttttcttcatcagccgcctgcccatttggggcgaacaactcaaggtcaatcccgttaggaagaaggtgaacacgctcccgctccatattggactgtccaaataaaaacctgcccgcatcctctccgcaggcacacagcgctgtcgcatttgccaaaatgagccgcctgaacacgagcagctgcaagcgatccttccagttgaagccggtcttccaagacgtattgtgggaatggcataccctgaccggcactccggcgagccttgccgcaagggcgataaaacccgtttggaaatccgtgtgcgcatgaacggcgctgaacggcccgttttcttttatcgcttttctcacattcctcacaaatgtaaggggattgctttgcccaatgctcgggacataaaaaagacgcccgcctaaagataaaatctcttcatcataagcgcacggatcatttcgatacgttaaaaaatcaaattgcactttgcttttgtccatcttccgatataaattcattaccatggtttccgcgccgcccctgttcatgccactgagaacatggagtacgcgcttttggctgctattcatgcttgacaagcccttccttttggttcatcactctttttttatggtagcgattcatcacggctgcaggcataaacgcgcggattaacggttttgcgatatatatgtaatcagataaaggaagcttcaagcgtctgcacgcctgatagacaaggatggcattgtcaattgaatacgtaaatgaccgccgtttgaatgcatcgctgtcttccctcactttatacaaggcttcctgaagattatagcccctgaagccctcttcaaaaaagcgaagccacaaatcaatatcttccattcgtctcgtccgccgcaccgaccggtagcctttcagcgtgcggtaggcactcgctctcatcataatcgtgccatggcaaaatggggtcccttttgccatgatgcccggctccggaacagaaggcagaatgcgggcgcctcttacgccaaattcatcaaacacaagcatgccggtgccaaccacctgataatgtcggtgcttttctaaaaacgcgacctgcttttccagacggcgcggaaacgaaaggtcatctccatcctgacgtgcgatataatcgcctgtcgcatgcgaaagacaatgatttaatgatgcggcaagccgcttatttgttttgttttgaatcagtttgatgcggtcgctgtaatgagcggcatactgcttcgcgatgcggagcgtgccgtctgttgacgcatcatcgcacaaaatcagctcccaatttttataggattggctgagtatggattctatgctttctgccaaagtgcgttcgcaattataaatgcccataatgacagaaactttcggtcctgagttcatacgcttttctcctttgtatccatatccatgtacgcggaataaatatctgccatttcttccaccgttcgcgcctccgagaagcgcaaggctgtttttcggccttcctgtcccagctttcggcagagctccggcttatggtaaagctgttcaatccggcgggcaaaagcagcactgtcaccgattttgaccagaaaaccgttttctccgtcgcgaatgatttcccgatgcccgcgattatctgtggcgatcgccggtttttctgccgccattccctcaagcacattcataccgaggccttctctaatgctggatgcgacagatacatccgcaagctgaatcaactcatgtatgtcgctgcaaaagccgtaaaaacagacattggcggaggcaccaagcttttcagctaacgtttgatacgtatgttccattgccccttccccggcaaacacaaggcggagtgagggaattttttcttttagcaaggctgcggcttcaattaactgcttctggtttttgttcagattgagctcagccggataaaccaatataaaatcatcttcacggaacccgtgcttttctctgagtctttgctgctctatcggactgacaggccggaaacgctcggtgttgacgccaatgccgtgaattttctgcgtccttccgcccggcctttgaagtcctttcgcccgtatgtaatcctcttcattaatcgtaatcaggcagtctgtatatgctgaaagccatttctcaaccggatagtaaagaagccaatttttcatcggtgcccctttgcagaagtgaaatccgtgtgctgtgtacagcacctttgttccgtgccgccgtgcctgcctcgccgccagtctggcgagaacgccgccgaccggtgtatggcaatggacaatgtcgtattcataggtgtcaatcactttcttcagctgcctataaacggccaggttctgagggtcaaaaggtgacctgcgaatcgggatggagaatttctcatccacatacggcagcttggtttgtccgttcgcagcgacatgaacctcccagcccatttgtttgaaccatttaaaataagggaggtgaaaggccttaaaatgataatcaacagtcgcgcaaaacaatatctttttcgtcattttcactccccctaatgaacgctggcagccgtcatttcttctgatgtattgattgccgcaaacagcctcgctctcaggtcggcttccggcagctcatgaaaatcctcgataaagcgcatcagcaccggccaatcgccgtccaccgctttaccgatgtgaatttttggaaagatttgttcagcatggacttcatttttgttcagcaattcttcatacattttttcgcccggacgaatgcctgtgaattcgattggaacctgctcagtcgtgtagccggacaaatgaatgaggtttttggcaagatccacaatctttacgggctctcccatatcgagaacgaaaatctgacgccctttcgccagtgccccagcctgaatcacaagccttgatgcctcgggaatcgtcatgaaatagcgggtcattgccggatgtgttactgtcaccggaccgcctttttcaatctgttttttgaaaattggaatgacgctgccgcggctcccgagtacattgccgaagcgaacagcgacaaatttggttctgctgactttcccaagattcataataatcatctctgcgaatcgttttgtcgcccccattacgttggctgggttcaccgctttgtccgatgaaatcagcacgaatgtctctgttcccgacatatcggctgcttccgcgacattttttgttccgataatattgtttttgaccgcctcttctggattgtgttccattaaaggcacatgcttatgggcagctgcatgatagacaacatgcggctcgtattttttcatcaaggtaaacattttatcgcggtcctgcacatcagcgatttccgtatggaacacaatgtgtttgccgaatcgtccgttcagctctgtataaatcgaatgaatgctgttttccccatggccgagcagaatgatttccttaggctgaaacgcgctgatctgacgacagatttccgagccgattgatccgcccgctcccgtgacgagaactgtttttcctttgatgcggttcgaaatttcgctagtgtcgagggttaccggctttctgccgagcaagtcctcagcttttacatctctgatttgtccggcagttcgtgtgccaagcagcatttcatcaaaatgaggcataattttaatgtttactccggttcgcacacattctttatataacacctgaagctcatgggtgcggagtgaaggaatggcaataataatataattaattttgagcttttgcaccgcaggcatgatactttcttttccgccgattacgggcagccccataatttctaatttatgcttcgtttggtcgtcatcaataaaagcgacaggtatgatatcaggttcatctttcgaaagcagctgcctgaccatcagagtcccacctgagcccgccccgataatcagcgcgcgggacgaggcgcagcgttttttcctgatgctttcgtttaatactctggataaaatacgggtccctccaatagacaaaagctgaagcacccagcacgcggttaacagacggaagaacatcgtgtgatacacagcatactgaatgacgccggtcacagcggctgaaagcgtaatgcccttaagcaggacaatcagctcgccaagcccggtgtatgtccacacctgtttatactgattgaacaggaaagcacacacatgatagctgagaagcaagctgacagcagtaagcagtaatgctccggagtcataaaattgataggaatcttttaaaaattgatatcctgcaataactgaatttaaaacgaggtaagtatccagcgcaataatcattgacagtcttctccggtaactcaaccttttcccccctaattcttttatcggtttagctgcggcggttttcgtctctccaaaaaatcggcagcagctaaaccgacaacacgtcctatgtatatatcagataagtgggcatttaacccatcctcacgccccgccagcgacgaccagcatctaaggcagcaacttcagctgcccacagcagagccgagtgcctccattgatacaggtcaggagacatcacctttacaaaaactagtaggaatagtgttccgattttttcattttctttttgtttaaaagagcgcctaacagcttcgcattggattgttccagtgcatcctttgctttcagaacggtatcggtttttgtttttccgcttaaaacgacgagcacgctgccgtctgtctgatttgctagaatctgagcatctgcaacagccaaaagaggaggggaatcaaagatgacgaggctgaattgttcatagatctcagatattaaatctcccattgcttttgaagacaacagttctgccgggtttggcggggtcggcccgcttgtcagtacatataagttatcgatcggcgtcttttgcaccgtctcactgagtgaagcattgccgaccagcacatttgtcagcccggttacattatcaacctgaaacgtctgattgatggtcggctttcttaaatcggcatccaccagcagtactttcttttcctgctgctgcgcaaagacagccgcaagattcgctgcactgaacgatttaccttcaccaggcacagaggaggtgacgaggatagatcgcaagttggtctggacagatgagaactcaatgtttgtccgaatggtgcgatattgttccgcaacaactgatttattgtgtaaaacagatatttgagccaaacctcgccttgctttcttttttctaaagatcactcgcttcactccccgaaatgttttatcccacgattccgccctttgtggacatcaggaacggagcctaagcatggcaatccggttctctcgctgagctgccgtgcgcttttgcaagtatcatcgagaaaatgcagaaaaaatgccagtgtaatgccgcccatgacagcagcgccaaaagccatgaccatatttcgcagcctggccggcttgatcatcgggctttcagaagccttcgcctctgataatatatgtacgccttgtacattcattctttcatctacttctttttcaaacttgttcactaacgtgttcgcaatctcagccgctttcgccgggtcgtgatcctggacggcaacgttgataatttctgattcattttcactgctggtaaccacttttcctttcagcgaggaagccgattcagataggtgcaattccgccttaacttcttccatcaaggcagtgcttttcataatcgattggaacgtgctgctatactgaagatttcgctggatgtcactgagattcgagttttcttcaccgtctgattcatgaaccagcacctgtgtcgacgcctggtaggtcggtgaaatgaccttaaattgcacaaaacccataataagggtgacgccgattgtgatgagcagaatcagcacgaatctgtgtctgacaatcgcatataattctttgaaactcatattctcattcatgtattcatagccttcagccttcccgcggctggcttcccgcgcccctttctgttaatgattggattataaaagaaaacgttattatttaaaaattgcaaaataagccaataagttctctttagagaacaaaatcatgattttcctctaatttactgcacttcccttattattttaaattttataaagaacgaaaaattctttataatgaacaaaataacgacaggaatagaggagaatttcatattatgattggaagaattatccgtttgtaccgtaaaagaaaaggctattctattaatcagctggctgttgagtcaggcgtatccaaatcctatttaagcaagattgaaagaggcgttcacacgaatccgtccgttcaatttttaaaaaaagtttctgccacactggaagttgaattaacagaattatttgacgcagaaacaatgatgtatgaaaaaatcagcggcggtgaagaagaatggcgcgtacatttagtgcaagccgtacaagccgggatggaaaaggaagaattgttcacttttacgaacaggctaaagaaagaacagcctgaaactgcctcttaccgcaaccgcaaactgacggaatccaatatagaagaatggaaagcgctgatggcggaagcaagagaaatcggtctgactgtccatgaagtcaaatcctttttaaaaacaatgggaagatgatgatcggttaagggctaacgttcgcatctatagggtaaatctgtttataatgggggaaaaagggagagaacacaatgactcatcaaatagtaacgactcaatacggcaaagtaaaaggcacaacggaaaacggcgtacataagtggaaaggcatcccctatgccaagccgcctgtcggacaatggcgttttaaagcacctgagccgcctgaagtgtgggaagatgtccttgatgccacagcgtacggccctgtttgcccgcagccgtctgatttgctgtcactttcgtatactgagctgccccgccagtccgaggattgcttgtttgtcaatgtatttgcgcctgacactccaagccaaaacctgcctgtcatggtttggattcacggaggcgctttttatctcggcgcgggcagtgagccattgtatgacggatcaaaacttgcggcgcagggagaggtcattgtcgttacactgaactatcggctggggccgtttggctttttgcacttgtcttcgtttgatgaggcgtattccgataaccttgggcttttagaccaagtcgccgcactgaaatgggtgcgggagaatatttcagcgtttggcggtgatcccgataacgtaacagtatttggagaatccgccggcgggatgagcattgccgcgcttctcgctatgcctgcggcaaaaggcctgttccagaaagcaatcatggaaagcggcgcttctcgaacgatgacgaaagaacaagcggcgagcacctcggcagcctttttacaggtccttgggattaacgagggccaattggataaattgcatacggtttctgcggaagatttgctaaaagcggccgatcagcttcggatcgcagaaaaagaaaatatctttcagctgttcttccagcccgcccttgatccaaaaacgctgcctgctgaaccagaaaaagcgatcgcagaaggggccgcttccggcattccgctattaatcggaacaacccgtgatgaaggatatttatttttcaccccggattcagacgttcattctcaggaaacgcttgatgcagcgctcgagtatttactagggaagccgctggcagagaaagctgccgatttgtatccgcgttctctggaaagccaaattcatatgatgactgatttgttattttggcgccccgctgtcgcctatgcatccgcacattcccattatgcccctgtctggatgtaccggttcgattggcacccggagaagccgccgtacaataaagcgtttcacgcattagagcttccttttgtctttggaaatctggacggattagaacgaatggcaaaagcggaggttacggatgaggtgaaacagctttctcactcgatacaatcagcatggatcacattcgccaaaacaggaaacccaagcaccgaagctgtgaattggccggcgtatcatgaagaaacgagagagacgctgattttagactcagagattacgatcgaaaacgatcccgaatctgaaaaaaggcagaagctattcccttcaaaaggagaataaatatggggaaaacaggatacattggtgctgccattgttgtggcagcttgtatcattattttgtcggccgtggtatgtttacgggacacagtctattaccagcctatgcgctggactggcatcatactgtttttcgtgggaattgtgatggttcccgcatactcagcaaaaagaaaacccggaaaagagaagtaattctcttttccgggtttttatgtttattataatcttcccgcgcgaatatcgtctgtcattccctcataaggagccttcgaaatcacttcttcgttgtcgactccttcatttttcagaaatgtaatttccgcaaattcaggtacaacgtattttggatacgtttcatatttttcgcgggattcttccatcaaatcaatgtggtcattttggtagcaaaccgtaatttcaggatgttcatgcacccatttcgggaagaaaataatgccgtgcatgcgtttttcatttggcataaagtttaatgaaacatccgtgccagtcggctctgtccaagacactttatatacgccttctgtcagtttgacaatattcacttcctgatcccgaacccagcgtccggcaaccattccgctatgaattctataatcaattgtatggtcatttttaatataaatctcgtattcccagccgttttcatacgtataaatcatgtggcttccgataaagttttccatttttcacactctccttagtcttttactgcacttcataaatgtctagtcgaacgtaatcaggggttctttctgcggaaccgataaacaagcggtcatggagccattgatagactttactgcctgtttcaaacgtcggtaccgtacgaaaataaacatgctccggatcaatgatttccccggctgccgcttgttttcgaaacggctcgctgacttgccgtattccattgttttcaatgtaaatcagttcatgatctgctgtttcgatcacatacctggcagataaatcgtttctgccgtcagcgcgaatcatttgcgaatcggcaccgctcggcaaaatacgtccctttacttccccggttattgttcccgaacgaatcggaatgaatcgtctcagtcccaggcctgtctcaccaatcgtgataggcggatcaaccttgatttctaaagaggcgaatggttttaaaaccggcttcttcacgagaaccacctcacctccagaaaaaatcatgtaactatttacatgtttaatttaacactattgcagttaactgtcaaacaataggaacataaaaaaacaaggactgtttgaagacagtccttgtctgaagctagctttgataagcaagatatgtgctgacagtgcttttggcaagacaggcagaggaatctataatcggaatctcactttgaatatgatctaacaccgcatttaaatccgtgcaggctgaaatgatgatgtctgcatgctgactgatttcttcatatagcgtctgccacaatgcttgtgtatgctgcatatgatttggctgtttgattgcggcgataagctggttcacagcctgctgccaatggtccttgtgaacaacttcttgtccatttgccttcagaactttttggtagatggcggattggatggttggctctgttcctaaaaccaccgctttttttgcaggatgcggaatctcttttatcgtttcctcaacgatatgcaacataggaaccgacaatgcctgctgaatctcttcatagtagacatgcgccgtattacaaggcagcgcaatgaaatccactcctgttttctcgagctttaccgctccgtcgataatcgcttttttcatctcgtcatggtcaattggacgatctgcatagaagggcgtcgggcatgaatagatcatcatgtgcgggtagtcaatatcgtttgaagccccatacagcttctgacagtaatcaatcaccttatcaataaacggcgaggtcgatttcggccccattccggctaatattccgatcatcaaattcattcctttctaatttgtacggaccgcttcttcttctgagccatcctcatagaggataaagcttttcgcagcatccccgcctaacataaactcgacttcaacagacaatgctcgcagaaagaaacgggtttccgaggaaggaaataactccagtctcagctgtccggtgatctccaaataaagccgttcattctcggctgtcacctgtgcagccgttccatcctgcaacaggtagctgccaacatagcggctgtatatcgccgtatcaattgcttttttctttttatcagcaggacgttccgggacctcatatggctggccaaatagaatatgttccgccgccttcagaatcgcttgttcatattcagtatcctcttccttattactcaaatagatcagtgttttacgatgatcgatatatcggatcatcaacgtcgaatagccgggccatcctccgctgtggctgacaatccgccctttttcaggactattttgcagtacccagccaaagccataatcaattgtttctccattgttgaggcgcactggagaaaacgcagattccttagaagccttgctgatgaaatcgtcctgatataaagcctgatcaaatcgaaacaaatcgcttgtgacagagttcaccgtcccatctccctgtatgccatcgagatacacaacatagttcgtttcctccagctcatcagggaggacgtatgtttcggaatgtacatcatacacatatccatatgcataatgatcaattcgctcaggcgaaagcctcctgttatacactcttgtttcattcatgccgatcggtgaaaaaatacttgttttcataaaatccgcatagctcatgccagatgctttttcaatgataaccgccagcagcacataccccgtattgctgtacatccagccttcattcggttcaaaataaccagatagcccctcattcatcagcatatcgacaatatcctgattcaccgcaatcttgtgtgaatcccaattggcaaaaaaccatcccatataatcaggaagccctgacgtatggttcaataaatgccgaatcgttacgccctgatacggaaaaccgggcagccagcgatccactttatcctcatagccaagaatccccttctcctccagcaagatgattcccaatgctgtaaaaggctttgacaaagacgctaactcaaacaaagagttggttttcaacgggcgtttttccgtcatttccgcatagccaaaagagtggtgatataaaatatcgccaccctccgcagccagaaccgtcccgttaaactgatgtttttcgcctaatgtctcaaataatgtctgaagatgctttcttttattctgtttcattcctccacctcccatatctctgtacgttactaacctactaacgtttcaaatattttgaaaaacccttcagttagagatcctttttaacccatcacatatacctgcggttcactactatttagtgaaatgagatattatgatattttctgaattatgattaaaaaggcaactttatgcccatgcaacagaagctataaaaaatacagagaatgaaaagaaacagatagattttttagttctttaggcccgtagaccgcaaatccttttatgattttctatcaaacaaaagaggaaaatagaccagttgcaatccaaacgagagtctaatagaatgaggtcgaaaagtaaatcgcgcgggtttgttactgataaagcaggcaagacctaaaatgtgtaaagggcaaagtgtatactttggcgtcaccccttacatattttaggtctttttttattgtgcgtaactaacttgccatcttcaaacaggagggctggaagaagcagaccgctaacacagtacataaaaaaggagacatgaacgatgaacatcaaaaagtttgcaaaacaagcaacagtattaacctttactaccgcactgctggcaggaggcgcaactcaagcgtttgcgaaagaaacgaaccaaaagccatataaggaaacatacggcatttcccatattacacgccatgatatgctgcaaatccctgaacagcaaaaaaatgaaaaatatcaagttcctgaattcgattcgtccacaattaaaaatatctcttctgcaaaaggcctggacgtttgggacagctggccattacaaaacgctgacggcactgtcgcaaactatcatggctaccacatcgtctttgcattagccggagatcctaaaaatgcggatgacacatcgatttacatgttctatcaaaaagtcggcgaaacttctattgacagctggaaaaacgctggccgcgtctttaaagacagcgacaaattcgatgcaaatgattctatcctaaaagaccaaacgcaagaatggtcaggttcagccacatttacatctgacggaaaaatccgtttattctacactgatttctccggtaaacattacggcaaacaaacactgacaactgcacaggttaacgtatcagcatcagacagctctctgaacatcaacggtgtagaggattataaatcaatctttgacggtgacggcaaaacgtatcaaaatgtacagcagttcatcgatgaaggcaactacagctcaggcgacaaccatacgctgagagatcctcactacgtagaagataaaggccacaaatacttagtatttgaagcaaacactggaactgaagatggctaccaaggcgaagaatctttatttaacaaagcatactatggcaaaagcacatcattcttccgtcaagaaagtcaaaagcttctgcaaagtgataaaaagcgcactgctgaattagctaacggcgctctcggtatgattgagctaaacgatgattacacactgaaaaaagtgatgaaaccgctgattgcatctaacacagtaacagatgaaattgaacgcgcgaacgtctttaaaatgaacggcaaatggtatctgttcactgactcccgcgggtcaaaaatgacgattgacggcattacgtctaacgatatttacatgcttggctatgtttctaattctttaactggcccatacaagccgctgaacaaaactggccttgtgttaaaaatggatcttgatcctaacgatgtaacctttacttactcacacttcgctgtacctcaagcgaaaggaaacaatgtcgtgattacaagctatatgacaaacagaggattctacgcagacaaacaatcaacgtttgcgccaagcttcctgctgaacatcaaaggcaagaaaacatctgttgtcaaagacagcatccttgaacaaggacaattaacagttaacaaataaaaacgcaaaagaaaatgccgatatcctattggcattttcttttatttcttatcaacataaaggtgaatcccatatgaactatataaaagcaggcaaatggctaaccgtattcctaacctttttaggaatattgctgtttatcgacttatttccaaaagaagaacatgaccaaaaaacaaaatcaaaacagaagccggactaccgggctgcatatcattttacgacgccggataaatggaaaaatgaccctcaaaaaccgatctattttgatggcaagtatcattatttctatctatataaccgggattacccaaaaggcaacggcacagaatggcgccatgccgtctcagaggatttggtgcactggaccgatgaaggcgtggcgattccgaaatatacaaacccggacggtgacatttggaccggttccgtcgtggttgataaagagaacacagccggctttgggaaaaatgcgcttgtcgcgattgtgacacagccctcagccaaagacaaaaaacaggaacaatatttgtggtacagcacagataagggaaaatcattcaaattctacagtggcaaccccgttatgcctaatccgggtacagacgatttcagagatccgaaagtcatatgggatgaccaggataacaaatgggtcatggtcatggctgaaggatcaaaaatcggcttttatgaatccgataatcttaaggactggcattacacaagcggattcttcccagaacaggcgggaatggtggaatgtcccgacctctacatgatgcgggcaagcgacggaacgaataagtgggttctcggtgccagcgcgaatggcaaaccgtggggcaaaccaaatacgtacgcctactggaccggaagcttcgacggaaaagaattcaaagcggatcagactgaagcccaatggcttgactatggcttcgactggtatggcggtgtgacgttcgaagacagcaaaagcacagatccattagaaaagcggtatgcgcttgcctggatgaacaattgggattatgccaacaacaccccgacaatgaagaacggctttaacggcacagattctgtcatacgcgaactccggctgaaggagcaggatggaacatacagcctcgtctcacagccgattgaagctttggagcagctgactgtttcaactgacgaaatagaggatcaggatgtgaacggatcaaaaacattgtcgataacaggtgatacgtaccagcttgatacggatctttcttggtcagagctaaagaatgcaggcgtcaggctcagagaatcagaagaccaaaaacgccatattgatgtcggtattttcgctgaaggcggctatgcttatgtcaatagagcagccacaaatcagcctgacaaaagcaatacctatgtcgaaagcaaagctccttatgatgtaaacaaacgtaaggtgcatttgaaaatacttgtcgataaaacaacgatagaagtatttgttggcgacgggaaaaccgttttttcaaatgaagtcttcccaaagcctgaagataaaggaattaccctttattctgacggcggcacagcctccttcaaaaatataacagtgaaacactttgattcgattcatgaataaaaacaggggcagcgcaggctgccctgtttttttattaggagcggtattctctgttacatattgggcattgtaagaaatataaggctggtttcaaaggaggaagcgaatgtctaaacaaggaaattttcaaaaatcaatgtcgctgtttgatctgattttgattgggatgggagccatctttggatcagcgtggctgttcgctgtcagtaatgtcgcttcaaaagcagggccctccggcgctttttcctggatcctcggaggagccattattttgttaatcgggctcgtatatgcggagctcggagccgctctgccccgtaccggaggcatcattcgataccccgtttattcacatggccaccttgtcggctacttaatttcgtttgtcacgattgtcgcttatacaagcttgatttcaattgaagtgacagctgtgcgccagtatgtggcctattggtttcccggcctgaccattaaagggtctgattcgccgaccatttccggctggatcttgcagtttgccctattatgcttgtttttcctgctgaattattggagcgtcaaaaccttcgctaaggcgaatttcatcatatcgatttttaaatatattgtgccgattaccatcattattgtgctgatctttcattttcagccggagaatttatccgttcaaggatttgcaccgtttggatttacaggtattcaggctgcaatctcgacaggcggcgtcatgtttgcgtatctcggcctgcacccgattgtatctgtagcaggtgaagtccaaaatccaaaacgcaatatcccgatcgctttaatcatttgcatcatcgtttcaaccatcatttatactgttttgcaggtcacctttattggtgcaatcccgacagaaacactgaaacatggctggcccgcaattggccgggagttctcattgccgtttaaggatattgcggtcatgctcggattaggctggcttgcaacgcttgtcattttagacgccattctgtctcccggaggaaacgggaatatctttatgaatacgacatcccgccttgtttacgcctgggcgcgtaacggcacattatttggcatattctcaaaggtcaataaagatacggggacaccccgcgcatcgctttggctttcgtttgccctgtccattttctggacacttccctttccttcgtggaatgcgctcgtcaatgtctgttcagtcgcgctcattctttcatatgcgattgcacccatttcttcagctgcgctgagggtcaacgcgaaggacttaaacaggccgttttatttaaagggaatgagcattatcgggccgctttcctttatatttacagcgtttatcgtgtactggtcaggatggaaaacagtctcctggctgctcggttcacaactcgtgatgtttttgatctatctctgtttcagcaaatatacgcctaaagaagatgtcagcctcgctcagcagctgaaatcagcctggtggcttatcgggttttatattatgatgctgatcttttcctacatcggttctttcggacatggtttagggattatcagcaatcccgtcgacctcattttagtcgcgatcggctcacttgcgatttattactgggcaaagtataccgggctcccaaaagccgccattgattacgataaataaagaagcaagaggttttcttgcttctttattctttacaaacatacatacacgcgataaaatgaatgagagtcagtcattatcggaggtgttcctcatgccaaaacaaacatcgggcaaatacgaaaaaattctgcaggctgccatagaagtcatttctgaaaaaggcctcgacaaagcttctatttctgatattgtcaaaaaggccggcactgcccaaggaacattctatttgtatttttcatctaaaaatgccctcataccggccattgcagaaaatctcctcacccatacacttgatcaaatcaaaggtaggctgcatggggacgaggatttttggaccgttttagatatattaattgatgagacatttctcattacagaacgccataaggatattattgtcctctgttattccgggcttgcgatcgaccactccatggaaaaatgggagacgatctatcagccttattattcctggcttgaaaaaatcatcaacaaggccattgcaaaccacgaggtaacggaaggaatcaattcaaaatggacggccagaacgattatcaacttggtcgagaatactgcggaacgattctatatcggatttgaacaagatgaaaatgttgaagtgtataaaaaggaaattttcactttcttaaaacggagcttaggtactgcttaaaaaatgactgggtaacaccgctcattttttaatgccctaaaaatgactgacgttcattcataaaatagagaggtgtttcatttgaattgggttcttgtttttattgcagggcttttagaagttgtttgggcctcttccctcaaacatgccgattcgcttttggattggatcatcatttttatcttaatcgcggtcagctttatcctgttgatccgctcttatcaaaaaatcccgatggccgcggcgtacactgtgtttgtgggaatcggaaccgtcggaacatatctgactggaattgttctgggcgaatccttctcagcagcccaaatgttctttttagctttattgctggctggcattttaggaatgaaattatttacgaaagaaagcaaatctcagccgggaggtgaacaataatggcatggtttttattagtgattgccggcatagaagaaattatagctgccattgccatgaaatatatagacggaacaagaaaaaaatggccaatcattgtgatgactgttggattcggcttatccttttactgcctttcccaagcgatgatcgtcctgcctgccggagtcgcatatgccgtctggactggcattggaagcattggtgtttcggcggtcgggctcatctggtttaaggagcggtttcagctttcacaggtgatttcactttgccttatcctagccggcgtcatcggcctgcgtcttacgtcatcttcataaaatcaaggcatatacagctgtatatgcctttgccattaagcttcgtgatgtttttgaagatgaagcggcggtgggatgagccagcctttgttttttagcagccttaagtattttgcgccggttgccgctttcgacatatgaaattgcccaaacatcatggcaatatcctcacgaatcgattgccccatcattttgctgcatgtcaccagacctgcagcattttctgctgccgcggaggccgccacatccggatcgagaaaccgtgcgccaggcggaatgtcgttaagatctgctgtcggcggttcaggagaagccggcggcagcgccaccccgttttctttcaggatcgtgctgacctgtttgatttcatcttggcatttctcaatagactcacgaagcagtttcttcaggtcgtcatcaccgacatgattcaatagcatttggtaattgccgaccattttattgcccgccatcacataactccacaagccgaatacctcaccgtaatgcatcggttcatcctgcggatttccgcttaaaatacccatgttcatcctcctcccatattcaatattgcacatttcataacgtgcccaagcggaggaacatttatgtttcagcggaaaagatttatgaaatgaaacaaaacaaaaaagacaagagtggcaagttgccaaaccattgtctttcctgttgtttgattggacgcactgaagggattcgcaccccgacagacaagataccggaaaccattcaagtgctttttaatatgagtcattgattctgtctttaataaactttaacgagatggcgggatgctttgcggaaaacgaaatacattttcggggtcatatttcgcctttatttctcgaagccgcgcaaagtttgcgccataatattcttttccgaagttttcaatgttttgatctggaacattaacatatgaacctgctacatatggttgcatcagctgacgcactctttcaactgatgcaagatttgaatcttcttgtgatttatttttccaactagccgtccattccgtataaaatattggatggcgccaaaaaaaggcagtttcgtctttagggactctgcttatagcaccaccccaattgataaaaaagaaattggcatctgttccagtagcgtcttccaaaaattttctcatgattgaaatgggttcgtcagaccaaaaatcatgaccccaagccgaggagaatttaacactctgatcatttctgccagggatgggttcgtcagggtctaagaaatctatagcatctggatagtataatgttttgatatctgcttctgttggagttcccgcatgtaataaaggttttaataatcgaatcaattcagttttcgaaccgaggaaaattccttctgcatgacacaaaccatttattttgctgtaaatttcaaggtagcatcctaatcgttcatctacaaacggagcccatttctgccaagctttaaataccgtttctaattgttcccacggccagataatattgaagacggttgcagttttaggggcacgatgaactttgaatgtatattgggtattatatccaaagttacctcctcctccgcctctagaagcccatagcaaatcctcattgtgagattgatctgcatgaataatccttccttttgcatctaccgttttcagcgcgagaaggttatcacttataaggccaatcgatcgtgagagtacaccaaatccgccgcccatcgtaattcccccgattccaactgttgggctatctccaaacggagccataaaaccgtctcgagctaatccctttacaagcgggccaacgggaataccagtttgaacggttgcaatcgcgttttcttcatctaagaaaactttattcatgtcactcacatcaataacaattcctccacttactactgaaaggttcttatctaaagcatggcgaccgcttctgacacgtaagggcactttattctcacgagcccatttaatggcattacttacatcgtatgaattttgcgcaaaaacaaagacaagaggatagacatccacataagggttccaattcttaatagcctctgtatagccggggtctcctttgaaaattacacgccctgtcaactgtgttgatcccatatattatttcactcctaaagaaattcgattcagatactaaaatatgcaggagctggataatcgcatagacaaatgatctacgaactataaatataatacgctaaggcctttttcgtcggtaaggtctgctgagaaacatttttcaaacaattttgagcaaacttcctgtccaatcctccaacaagcgttttttcttatcgtttttaggagcagtgtccagtttttttcggagtgaatattcgtttaggccaaaagaaaagagagatgaagaagtgtttagtaccagaggtatacatccatacaacagactctagatcatcatatactgaatgtatgtagaaaggagacatcagctttggcaaaatatcggattatgacctttgacggcggcggtaccttaggtgctttaagtttgcaactgttaaacagattggctaggcaaaacccgaagttaattagtcgaacccatgtattttcgggaaattcaatcggttcatttactgcccttgcattagcaagcggaagatctccgagggaaacacttcagtattttgaggatgaaatcctacccgcattcagcatttcccggccaggcggacctgttttcaaccaacaattaccctattccggttttattaaagcggtaagaaattttttcccagcagatcttcaacttatagatttaagaaaacgaattgttgtcccatcattcaaattatactctcaaaaactggatcgttggactcctgtcttatttcacaattttcccggctctccctatttaaatgagaaagtaagtgatgtcatactgcggagcagcggtgctcccgcgacgcaacgggcctatcaaaactatgtggatgggtatgtagtagcaacgaaccctagtacagccagtatcgcgtttgcagttggtaaagccaatgtgccattggatcaaattgcggtattgtccatcggaacaggtgaagccccgacccggttaagaagagatacgaagggatggggaatggtaagtgcagataacatccgccccgaaaatctgaagaaccttcctccaaattggggagttcttttggacaggtcgcctaatgaacctttactgccatttcttcagatgattgctggcggtaatgggtactatgaatccatggtcagtgcgaatcttctgggagatcgttttttccggttagatccacggattccgaacttctccaaaacggaccctgccgtcgttcccgctgtcattgaaattgcgaacaaaaccaacttacagcctgcgattcaatttatagagaagaactgggggagtaaataaatttttattttaaaactattctcacttatccaattttgtccgagagaagattctcaaaataaatacaggcaatgggtagaaccggatttttttaaaggtttgttaatcacaagctaataagatgaatgaaaaaatcaattcatacttcttcttttgaaagtgagggttcaaactaaagaatgtaattgaaatgttactctaaggtatgcaattccctttttcacacaaaaaagacaagagcggcaaatcgccaaacccttgtctttcctgttgttctattggacgcgctcggagggattcgaacccccgacagacgtggtaccggaaaccaccgctctatccaactgagctacgagcgcagaatgactgcgttatgagaacgtcagcacaactaattatacgataattccattcaaataacaaccctctatttcgagaggccgttttttaaatagacaaagcatcttaattggcaatctgacatacgatggtttgaacccctgtatttttggggaaaatgggaaaaagagacgactttgcatatcaggccagctttttgtttgacctttattgaccaaaaatgtatcatgtaactacatacttacctaaaaggtgaaggaggagcattatgaatttaatacctacagtcattgaacaaacgaaccgcggggaaagagcgtatgacatttattctcgtctattaaaggatcgtatcatcatgcttggatctgcgattgatgacaacgttgcgaactccatcgtgtcacagcttttattcttagcagcagaagaccctgaaaaagaaatttctctttacatcaacagcccgggcggctctattacagccggtatggcgatctatgataccatgcagtttattaagccgaaggtatctacaatttgtatcggtatggctgcgtcaatgggcgcgttcctgcttgcagccggcgaaaaaggcaaacgctatgcgcttccaaacagtgaagtcatgattcaccagcctcttggcggtgcgcaaggtcaggcgacagaaattgaaattgccgcgaaacgcattctcttgcttcgcgacaaattaaacaaagtccttgctgaacgtactggccagccgcttgaagtgatcgaacgcgacacagaccgtgataacttcaagtctgctgaagaagcgcttgaatacggcctgattgacaaaattttgactcacacagaagacaaaaagtaataacacaacctgcaagagctgcgtctcttgcaggtttttttcatttcaaggaattgactcccttaaacactttttgttctatactgctcccatccctcatgtaacagctcaagcgtcaaatcattcgtctgcctcacaaccagatcagcaccaagcatcggctgtccttgaccgacaccaaccgcaaacatccccgcagatttgattgcagaaatgcctgcttctgcgtcttctattgccgcgcaatcagcaggggaaacatcgagcatcgctgcagctgttaaaaagatgtcaggatcaggcttccccttcgcaagagtcgtcggatcaacaatggcatcaaaatcatcgataattgccaaacgtcttaaaatcttaggagcattgcgacttgaagatgctaacccgatttttatattttcgtttttcaattgacatagaagcctgccaatccccggtaaaagatcttccggcgtcaatttgctgatcagcatttgataatcgcgatttttccgatgcataagctcttgtttctccgcatttgtatactttgtttccgcaccgccaaagatcaatatgctttcaagtgactcttctctgctgattccttttagcctttcattcatgtctctgtcaaaagggatattaatttgttctgcgatgtgcttccaagcgagaaaatgatattcagcagtatctgttatcactccgtctaaatcaaaaatgaccgctttcatatactaatgcccatcacagcttcataaggtttgaggctaatactctttaagtccgcccgctcctgcggatagtttgaaatcagcactttccaacgctcatgaatcagttctggaggcgcttcgaacagagccttttcttccgataaattcacaacgacaagaagcttttccccttgatattctcgaaggtaagaaaagacctgcggatcattctcctgcaaaagctgataatcgccatatatcataatcttatattgctttcgtaattgaatgagcttctgatagtaaaagaaaatcgaatcttgatctttcaaggactctttcacattgatatcttggtagcgggaatttaccggtatccacgggtttccggttgtgaatcccgcatgttttccggcatcccactgcataggtgttctcgcatgatcccttccttttatcatcacggctttgagaaactctttttctgacatcgttttgttttcgacgactagttcacgatatgcattctttatttcaagatcatcatacatctccagcggcatatcgctgttgaccatgccgatttcttctccctggtaaataaacggcgttcctttcatgccgtgcagaaccgttgcaaatgccttcgcacattctttacgcagcttcccatcattgccccagcgggaaataaccctcggctggtcatggttctcaaaatacagggtattccagccgacattcattaacccggtctgccaccttgtcatcgtcttttttaaagcaatcaaatcaaacggcttgatctgccatttcccatttggcgagttttgttctgtatcaatatccatatgttcaaatgtaaagatcatattcagctcttgcctgcttgcatctgtgtactttttcgcctcttcaatatcagagccgtttgcctctccgactgtcatgcagtcgtaatgagaaagcacttccctgttcatctcttgaataaactcatgaagacgggggccgttagagtgataacggccgacaatatagctgcggctgtgatccgtttcgtagtccggaaaatcggtgtatttagaaatagagccgatcacatccatccgccagccgtcaacgcctctatccatccagaatctcattacatcataaacttcccggcgaacggcttcgttttcccaatttaaatcaggctgttttttcgaaaagtagtgcaaataatactgctctgttccttcatcgtatgtccacgctgagcctgaaaagatcgatccccaattattcggctctgagccgtccggtttaggatctttccaaaaataataatcccggtaaggattgtccttcgacttgcggctttcagcaaaccaagcatgctcatctgatgtgtggttcacgaccaaatccatgacgattttcattccgcgtttatgggcttcatcaatcagctgaaacatatcttcatttgtcccaaacttttcgtacatgtttttgtaatcgctgatatcatatccgttgtcatcctgcggggaatcaaataccggggagagccagatgacatccgccccgagatttttgatgtaatccagcttttgaatcacaccttgcaaatccccgaatccatctccattggcatcataaaaactgcgcgggtaaatttgataaacgacagcttctttccaccattcactcattaggcgttctcctttcacatcgtccctgtaggacaactggttcctcataaacgttcatgtgcagcggctcgccttttacaagctcaaaaataacgcgcttttcgtcaaccgtcacattgattaatcgatttcgataattgatgttgaatgaatattcgtcccattctttcggcaaaaacggagcaaatgacagcgtctcattcgcggtgcgcatgcctgcaaagccatgaacgattgccagccagctacccgtcattgaagtaatatgcaagccttcttccgtatcatgattgtaattatcaagatcaagccttgctgtgcgcttatataattcgagcgctttcttttccagcttgagttcggctgcgagaatcgcatggacagagggcgataggcttgattcatgaacagtcatcggctcataaaattcaaagtttcgccgtttttcttccattgtaaaacggtcattaaaaagataaatgccttggagaacatctgcctgcttaataaaattggagcggagaatcttgtcccatgaccaattctggtaaagaggccgttccgctggatctaattcgtcaactgcttgcaggtctttatccaagaacgtgtcatgctgaacgaaaatttgcagttcttcactatacggatagtacatgtgctggatgatttctctccagactttcaattcttcttcctgtacatccagaaggcggcgtttctccgctgagatactttcgagactttgtagagtatactccaacgtccaagccgcaatgacattcgtataccaattgttgttaacgttgttttcgtattcattcggccctgtgacgccatggatcatatacttattttttcgtttcgagaagtgaacacggtcggcccaaaatctgctgactgccacaagtacgtctatcccgtattcttccatatagttacggtcgcctgtataattgatataattgtagatcgcataacagatcgcgccattgcggtgaatttcttcaaaggtgatttcccattcgttgtggcattcatcaccggtgaacgtcaccatcggataaagtgcccccttcatccccaattttgccgcgtttcgttcggcagcctccaactgatgatagcgatacaaaagcaggtttttcgtcacctccggctcggctgtcgccaaatacatcggaacggcgtacgcctcagtatcccaatatgcggcacctccatatttctcgccagtaaatcctttcggcccgatattcaaacgggcatcgcccccgtaatatgtcgagaataactgaaagatattgtagcggattccttgttgaagctcctcatctcctttaatctcaatgtccgcttttgcccatctttccttccatcgatcagtgtgcctccgttttgcatcttcatagccgttctctaccacatccgccaaaagctccttggctttcgataaaagctcttcctcccgaaaatcacgggaagtcgtgacaatcacaaactttttcaatgatgccttcgtttggtagctgtagcgattctcgacatacatttcattcgttttaaagcttttattgacaaaaccctccgtctcatttgccattgcggctaaaaccgtgaagcgcggtgttccaaatggattttcgatcgtttttgccgctaaatggccgctgtgagaatcagcacctttcgcttcctcctgccaaaactgttcttggtagttagaatcttcatttgccacatttccatccaggtaaggaacaagcgtaatgacagcatctcccgtcaggcactccgcttcataatgaatcgcacagagttcttttacagcaaggctaagaaaccgctctgacctgattctgacggatttatcctgaatgcggacaacagcgcttcgccgcagaatcccctctttcatattgagttctacctcaaatgattcgattgggttttgatggagatcgattttttcaccgtcaacatataggcctatgcccataaagttcatcgcattgatcacttttccgaaatattctggatacccgtttttccaccagcctactcgcgttttgtcggggaaccacacgcctgcaatatatgtgccttggtgactgtcgcctgaatagccttcttcaaaattccctctgacccccatatagccattggcaagagacgtcaggctttccagcagccgtgtatgctccttattaaatgtatttgttttgattttccattcatcaatctcaaataaccgctgatttatcatcatttcctcccgaatgtaagtttccattatcacggcgggttttggtcaaatatctaaatgcaaaagaaatcatcaaagtaacgccacacgaatggatcatcaatacagtaatcaaatcaaaatgaaccatgccgatagcagctgccgcaaatgccggcagtgccgaggcgcaaatcgccgtagatactgcttccttgaatgacgcaatagagatcatgtttgatatttttgtgatccagaggccacctgcaagaacaaacgttaacaaaagctggatcataaagattaccgcatatgccagcatcatgatcatcggcttatactgtgccaaccataatgtatcgatcaaaacctctacatcatggacgtttggtttctcgagcttaacgtccattttcgcatagccaacagaaaaccccgtttcgttttgatcggtgatcaccagttgatcaggttgaaatatgatagcgttttcaaatccagttactttcaatcgcccattttcaccgcttgtctcatattcatgcttcatatcgactgccatcacattctgcccatcttcaatcctctcagaactcttcccgcctgttagttttccgttcctgatttgaaaaccctgtaattgatcagcaaattgatcattaaccccttgaatcgctgacggcatgaaagatgcaacgctgaagcgatccattttcacaaacgaaaccgctaacggcgtcattaagcaggccgttaaaaacagaaagagaaaagagagctgcagccagctgaaagtattcccgtaacggcaaacacctgatggggatgcacccgccttcaggcagcggatgataaagcttttattctccagattcttcattggcattacccctttgttccgccggctgtcaatccggacacaaagttcttttggagaaaaaagaataagacgcatatcggcagcgcggcaagtatggcaccggctgcaaatagagctactttttgctgctgcggattagaaataaaggattgtaatcctacagcgatggtcagcctttccggtgagcgaagcagaaatttcgccagcaaatagtcgccaaacggtgccataaacgcccaaagcgcttgtaccgcgagcattggcttaacaagcggcagaacaattgaagcgaaaatcctcagatgtcccgctccgtcaattcgcgcggcttcatcaatttctctcggcacagtatcaaaataacctttcatcagccacgtgttcatcggaattccgccgccgatatagatcgctgttaaaaaccagtattgatcgagtgcgcctattagcatcgccaagacataaaaagcagtcagcgccgccattgtcggcaccatttgaatgattaaaaagaatatcaggctcttttttctgcctgcaaaccgatagcggctgtacgagtacccggcaagtgtcacaatcgtaacctgcaaaaccatgaccgatagcgcgatgacaagtgtattgctgtaccaatgaagataaagcgtttcttcaaatagccgcttaaaatgatccaacgtccaaggacccgaaaaatcgagctgaaaagccgccgaattccccacacggaaggctgatgatgccgtaatcagcaacggatatataatgacaatacttaaaagcgtcaaaaagaaatacgtacagattttattaagcattctggcagtgctcgcgttcacctacataacctcctcattgccaaaagcattcgattttttgaaagcaatcagtgaaattccaatgacaatgaaagaaattaacagtgtcacagccgccgcaacggaatattggggtgatgtgcctgttgtcagtttataaatccacgaaattaagatatcggtcgatccggccccggctcccacactgcctggccctccctcattaaataaatagatgatcgagaaattattgaaattaaacgtatactgagtaatcatcacgggtgctgtggcaaataaaatcatcgggaatgtaatatgccgaaaacgctgaataaaagtggccccgtcaatctttgccgcttcatacaattcacctggaatcgcctgaagcactcccgttaccatgacataaatatatggaaagccgagccacgtctgaatcataatgagggctgtctttgtccagaaaggatcagtcttccacgcgatcgcaggcagctcaacaaacggcaggtgattgaatagtggaatcacctgtgcattcaccgctcctatgctgtcgttaaacatgttggaaaaactcatgattgtaataaacgccggaacagcccatggaaataagaaaatcattcgaaatatccgcttgccttttataaaatcctgattgacgaaaagggccgtcacaatacctaaaatgatttgcagcgttgttgcacagattgtccagataaccgtccagcccagtacattcacaaatgtttcacgataggagccaaggaaaaaaatattcaagaaatttttaaacccgacccagtcaatcagacgattaggcggaatatgataaaaatcatagtttgtacatgcaacaaacagagtcaccaaaaccggaaagataatcacaaacaccatcatgatatatgccggcagtgtaaatagatatggaaaccctttatcgcccgcatgacagatcatatccttggctattgtattgacttccaaacccgccgctttcatagcggcggtcttacgtgaatcatgaatattaaagatatagaacatgaggaaaatcattgtcacgatcaattgcagcgtgccttcaatcagcataaacagcgagtggtcttcaccgggaacacttcccaatgtcatcaatccggttagcgcctgtataccgaaaacgcataattcaaaagcaaacaagcctgtaatggcaagaaataagagcccctttgacaattgctgattcgcaatctgcccaagtcctggaatgatcgataaaagccctgcctttcgtttttgctttgcaagtgtgtgatgtttattcattttttccgccctctattcttccggacgctatcccgccgttttatttcacatacttttctttaatattttcctttatgacgtttacagcatcattcgctgatgtttgtgtcgatttttttcctgaagctgcatcaaaaattaaactttccgctcctgtccatacttcagccatttccggaatatttggagtcggcgtcgctgtttcatattgtttaatcacagctgacgtcagttcattcttttgctcatcggctttcctccttgcggcagtgttggccggaacttcgtttgtattctgataaaaagcgtaagcattggcatcatttgcagcatactcaagccatttttcagccagctcgggctcttttgtatattttgaagctacccagcccttcccgcccgcaaaaggggcatattcttctccattgggcaatgtcggaatgggagccgctccgtagttcaatttagcctctttatagttggcagctgaccaaggaccgccaatgatcgcagccgctttgccttctaaaaacatctgctgaataaagtcgtctgcgcttgaattgtcttgcattcctttcggccaatatgtttcaaaccatttctccgcatatttcaccgcttctacagcccctttattgttcaggccgatgtccccggaatctgtgccgttttttccaaacacatatccgccgtaaccagccaataagccgtacgacatataaaagtcagtccattttgctaaaaatccggttgattttcctttttccgaagcaaacgcgaatcgaggatcttccgttaacttttcaaggtctttaaatgtttttggcgctgtttttaaaagatctttgttgtaatacaaaataagtgtctcaatgactagcggcattccgtacactttgccgtcaactgtcacctgctgcatttctttatcaccaaagctttttgtgttagatggcttaatatcaagtaaatgtccttgttgtcccaaaccgccgatccggtcatatgcagcaagcataacatcaggcgcattacccgccgggccatcaagaggaagcgcttctaactgttcgaacatttgcttttcaacaatttttactgtgacatcattctctttttcgaactttgtttttatgctttcaatgtattctttatacgtttcttcgacggacacagtcagcacctttttgccatcagcgcttgctggattttttgaacttgagcaggcggcaaggccgattgccaggaatgatgccgccaatatggcgaaccccttttttaaaagaaccatctcttttcccccttctatttacgaaactataacaattgtattgtcctatagaaagcggttacaacaacttttgatttgttaccgataacagaatgttatacaggggcggcagcactcaaaatcaaaaattctcccggctgaacggtaatgacatcgtgatgctgaagcggctgctctgtccatgcatcacagatcctcttattcctttcaatattcaaatccagtaaactgacatgttgaaccgcattcccttgattaaagaaataaatcagtattttttcatcaagagtccgtgaaaagctaataaaatcgttttggtcatccagcagattccactcaagatgtccttcagtcaataaagtgttttcctgcttgcgtaaagcaattaaccgtttcataaattgcagcatgtcttggttttgcttctctttttcccaaaccatacattttcggcataatggatcattttcgccgttcagcccgatttccgttccgtaataaatgcatggtgagcctgtctgggcaaacataaaggccagcaacgcgcgtgctttcttctcatcattgcggcatctggtcaaaaggcgctttgtatcatggctatccagtaaattaaacatcacctcattggcctgcttcattccattcatcaaatgtgcattgacacggtgagccatacgtgaagctgagatcgtctggtcagcaaagtattcaatcataggctctgtaaaagggtaattcatcgccgcatgaaattcatcccctctaagccagggttcggcagaatgccagatctcacctaaaatataaacatcaggcttttcagtagatacagcctgcctaaatgtcttccaaaaagcgtgatccacttcatttgcgacatccaaacgccagccgtcaatgtcaaattcgcgaatccagtacaaagcaatatcaagcaaatatttctgcacctcgggattagccgtgtttagcttcggcatatcagctgtaaaagcaaacctgtcataattgtcgtctgtgacgggaaaagagtgaatatggaaccagtctttatagcgggattgatctccgtttttgacgacatcctgccattgcggagacgcgcttcctatatggttaaaaaccgcatcaagcataattctcatcccccgctgatgcagctggctgaccaatgtacgaaaaagctcaggatccccgaaatgcggatcaatagaaaagtaatccagcgtgtcgtatttatgattagaaggcgcggaaaagatcggtgtcagataaatgccgttcacccctaaatcctctaaataatcaagcttgtcaacaattccttgtaaatcccctccaaaaaaatcattgacgcccgggtccttgctcccccacggcaatgcattcttcggtgacaagtcttctcttccatttgcaaaacgctccggaaaaatttgataccaaaccgttgacttgacccattcaggcgcttgaaatgtatcagcctcgtgaacaaacggaaatttaaagtaataatgaatcgtttccagtgttttttcgttataagggcatacacccgaacttccgaaaaagatgtcttcatgatcgtctgttacaacaaacgcatattgtaaacgcctaaatggcggcaccacttcagcaaaccaatagtcatgcatttctgtagcagcaattttcctcatcggctgctcgtttgccgaccacttgccgtcgttgtactcatagggatcaccccaaatgaatcgaatgtgatctgcatcacctttttttgtccgaatcttgatatgcacagcccgcccatcataagaataagcatctgtgctgaatggctggtggtgaatcgctgcatattccatcatgtttccccctttgatttccgttttattgaagccggctcatagtttgaaagtatcatgatgaaattgtgggaacaatccttttcaccctgttaccgataacagaataaggcgcttacagcgttgattctcgtacaattaactctggttcaaaaaatagacttccttgtgcagcaccgtcttcattcatttttttcagcaacattttcgcacaggcttcccccatttcaacaacaggctgtctgaccgtagtcaagcgcggcgaggagatgcgatcaagaaacacaccgtcattcccggtaaccgcaacgtcttccggaattctctttccaagggattgcgccgcacgaatgacgccgagcgcgattcgatcagatgcgcagacaaatgcggcttgattgtccatggatttcagcagttctcttgcaaggccctcacttttcttagaactgttgtcgatccgaaacatattcgattttttaaagcttttattcatcgcccgtatatacccctgttctcttgcacgttcgaaaggctcatctaaatcaatgccaaaaaagacaacttcccgctcccccagccccataacatggcgggttgccataaaagtgcctttctcgttattcacatcgataaagtcatagcccatttcattttgtccaaatacgacgagcggcttctcaaacgcttttattacaccttcaaaatcgttctttctcaagccggtggcaataatgccgtcacattggccaatattaagagaatttcttgtcacaagctggagagcatagtgattgcgatccagctccctgctgattcctgtcagcaggttcatgtaatatggttctgtcgtatccatttcctcaagtatcaatagtttcacaacctgtgttctgttttgcacgagcgctctcgccgcataattagggatgtaattcagctctttcatcgcagaatgaacaagctttttcaattcatctgtcaccgtctcagggtgattgatcactcgtgataccgtcattttcgaaacatttgctttttttgccacatctgacaatgttgccattttcatcccctccttatctgtgcttattatccaaactagtgataaagtcctctattactgttaaatatacgatgcaggcaaaagagaaataaaaaagagatttcccttaaggaaacctcactttgttaaaaactctcgatttttcatggattcatacgctaggtggcagactcattctctccacttccatgagaaagtctcttttttaaatttctgtccactttttttctaaaatcggataagaataattttgcatttgctcaattaactcatccggccgtgacgagctgtgaatcagttttaggtgcgattcgttagaaaacccttcttgaatgctgtatttcaccattttcatcattggttcaaaatatccgtttacattgtacagtccgattggcttttggtggatgccgatctgtgcccagcacagcacttcaaataattcttcatatgtaccaaagccgcccggcatcgagataaagccgtccgccagctcgctcattttagcctttcgttcatgcatcccgtttacttcaatcagctcagtcagattctgatggacaacctccccgctgaacaaaccgctcggcatgaccccgattgcagttccgccgttttccataatcgcgtcggcaatcgtgcccatcaagccgacgcgggagcccccatagacaaggccgattccctgctcagccatatacacgccaagctctgccgcttttcttttatacgcttcatttcccccagggtttgatcccgcaaatacacaaatggttttcatcttgtcatctccgcatctatatatcgtgttaaacattcaaaaacacactatatattgtcccatcttcatgtgataatatcaatatgaaatacataaagaatgcaggagtgatgaggttgcagctggctgatgcagaaaaatggatgaaagagttttacgaaaaaagaggctggacagaatacggaccttttattcgcgtcggctttttaatggaggaagccggagaattggcccgggctgtcagggcgtatgaaatcggcagagaccggccggatgagaaagaatcgtcacgcgctgagcaaaaacaagaattgattgaagaaatgggagatgtcatcggaaatatcgccattcttgctgatatgtatggtgtctctttagaagacgtcatgaaggcccaccaagaaaaactgacaaaacgatttgagcatgcataaaaaagcggccgcgatggccgctttttttaacctgtgatttcatcatggtgatcaaagaaatgctgctttcctattttgtgaaaaaggcctgttttatgcagcagctcctttggctgcgattgcaatcctacaatcatcagctttccattgtggcgtttaatccgattcataatgttcccaagcaccgcttcagctgacgtatccatatagtgcaccttattcatgagcagaatgagggttttcggttttttctgtacatgctccagcaatgacgattcaagggaatcaattgatccgaaaaacaacggtccttctatggcatacatgctgacagatggatcttctctcttcgccagaacaggatgcgattcctgattgtggatgcgggtcgcttcgctcattcttctgataaagaacacaaatgcaagcagcaatccggttgccacaccgatgattaagtcaaacagaaccgtaagggcgaaggtcgccgccaaaataaaggaatcagcgtttttcagtctcagcatgtttgcgacttccttgcgctcactcatattccatgcgaccaccatgagaatcggtgccatactggcgagcggcacatgggacgcataaggcgcaaatacaagcaggacaaggagaacgactacgccgtgaacgacgccggaaactggggaaaccgctccgttttttatattggtcgccgttctcgcaatcgctcctgtagccgggattccgccaaacaggggcgctgccatattcgcaattccctggccgacaagctccttattgctgtcatgctttgagcccttcatgttatcagcgaccattgcggacaaaatcgactcaagtcctccaagaagcgcgatgacaagcgcagccggaaacagcataaccattttatccaaagtaagctcaggaaactgaaattcaggcaaatggcgggggatttctccataagttgacccaatcgttgccatgcggtcagggaaaaagacaaccgcgaccactgtggaaataagaagcgccaacaaagcgcccggcactttaggcatcaccttggcggatacaagcaaaatgacgagcccgatcacagctgtcaaaatggcatatacgttaaaggtgccgagctgctgtacaatttcaaacatgttgtggtgaaagttctcatgtttttcaacatttctcaatccgagaaaattagcgatttgttccgtaaagatcagcacggcaattccggctgtaaaaccgacgataacgggtttaggcacgaatttcattatttttccgagcttaaacagcccaaacagcaccagcattacccctgccataaaccctgcgatcagcagattctctaatccgtactgcatgataatgccgaacagtatcgggacaaaggcgcctgtcggaccgccaatttgatatttagatcccccgaacaaagagatacaaatccccgctataacaacagtgtacagcccgtattcgggctcgactcccgaggcaatggcaaacgccattcctaaaggaattgccacgacacctactacgatacctgcaattaagtctttctgaaatttctgtaaattgtatcccttgaatctccctgagaatcgcatattttgttataacctcccttatgagtgattgtttattagctcagtttcataaccgttaatgaccacatcaagttttcctgtttcagggtgaatgacaagcccgtgaaccggcacttttttcggaagcagcggatggttcttaatcatgttcacactgtgggaaacgctttcttccacgctgtgaaaaccagtcagccacgttttcaaatcgagtccggcactcgtcagcaaattcaggcagctatcctccaccccgcgttcctttgctttctcaagaatcgaggacgcattcagccctgacattccgcattcatgatggccgacaatgcatacctcttcagcctgcaattcataaatcgcgaccagtatgcttcgcatcacgcttccaaatgggtgagaaacgatggctcccgcgttttttacaattttagcatcaccgtttttaagccccattgcttgcggaagaagttctgtaagccttgtatccatacaggtgacaatgacgagctttttcgaaggaaactttgtcgttttgtacggttcatacttcttctcactgacaaaccgctgattgtgttccaaaattgatgttaaagaaaccatttgattcatctcccatccatatgattttgcaagccttcttacccagcttacagtaaggaattatagcataggaataagccaagaaaaggctttcaaaaaaagacactataattggactgtagaatcaaaacataaacatttatatctttcaaagataataaaatttatatttaatgaatcctataatccggctgcagctcgcatattgatgatttgtctgacaaaaaatatgggtgaattctgataattaaaaaacttttttaagcagatatagctgttcgatcttcattttaagttcaaaagaaccagaaactaaaaaaacgcagctatatttttaacacctatttattttcgatataatgaaatagacaacagccataaagggggagccttgttgaaaccatttgtatttatcacaaaaccgattcctgaagagattgaagcattcatcggtgaacattgccgttatgaagtatggcaggaggatacgcttccgagtgacgtgctatttgaaaaattaaaagaagcggagggacttttaacatcagggacgtccgggccgtcaatcaatcgtgagttgctggaacacgcgcctaagctcaaagtggtcagcaaccaatcagtaggctacgataacttcgatatagaagcaatgaaagaaagaggagtcgtcgggactcatacaccttatacactggatgacacagttgcagatctggctttttcactgattctgtcttccgccagacgtgttgccgaactggaccgttttgtcagagcaggaaaatggggaaccgtggaagaggaagcgcttttcggaattgatgttcatcatcaaacgttaggcattatcggcatgggcagaattggagaacaagcagcgagacgcgccaaatttggttttgatatggaagtgctttatcataaccgacatcgcaaacaagaaacagaagacagcatcggcgttaagtatgcagagcttgatacattgctggagcaatctgattttattcttctcattacgccgctgactgatgaaacctatcacatgataggagaacgcgaatttaagttgatgaaggattcagcaattttcgtcaatatttcccggggaaagacagttgatgaaaaagcactgattcgcgctcttcaggaaggctggatcaggggagccggcttagatgtatacgaaaaagagcctgtcacccaagataatccgctcctgcagctggataatgtcacgctgcttcctcatatcggttcagcaacagctaaagtgcgcttcaacatgtgcaaacaggccgccgaaaatatgctcgcagcgatccaagggcaaacaccgaaaaatcttacaagagaatttcaataaatcaaaaatccggtctgataacagaccggatttcatattacatacgctgaagaacagcacgcttataaatatgacgggtgacgatataataaagagcctggaatacaaaataaatgaagatgacaattacggcctcaagaaataaattggaattcagcatattacttaacgctgcatacgcaaagcccgcgtgaatcgtacctgcgataaatgggatgaagaataaaaatcctatttgctttccaaggatcgagtgaatctctttgtccgtaacccctatcctctttaacgctaacacctgcactctcgtatcttctatttccgtaaacatccgcaaatacagcatgcttccttgcacgataaaaaacagcacgctgacaaacagaccaataaacagcattaatgcaactccctgcttcacaatttgataactaggagcacgtgtttgaaaatcagatgtatgttctttcggcaccatgttttcaagcttttcagagacatccaccgtctcctgccaatgctcaagctcataacctaccattctcatctgttccttcagcggcacatcctgtgacagactgtcaaagctcttttcgctgacaaccaataaacggctgactccatcgacagacatcaatatccctttgttttgctgctttttcatgacataggaaagggtttttcctgacttcatatgaaatgctgctgtttccccttctccaaatgtgtctttcaccatcatttgaaaagaaacattaataaatgcttcattttcttgtaaatgaataactgggaaccctttttcctttgcgacttgattatagactttttctgaaatcagcaaagcttcagcttccatcttcttatttccatacggcaagtctgactgaaaagtgacaggaatccctgtggcatccaccttatacttgataacagcatgagcttttttcaatgtattctcagctgtctcaggcttcatgacctgaaagcgggaagcatccttttccacccaggaaacagactgaggaatgctttgctcctcctgcctttgtaaatcggaataaaacatatagatgacacctgtagctgttagtatgaccgctgtaatgacagaggttaaaaacagcatgcgtgcatgatccttcagcctgaatatcatgttggaacgcacaatgatattcgtgcctttgtagaagctgtgtttctttcggtacagcatgcggaaaaacgccacactgctttgtgtaaaaaagaaatacgtgccaactaacactaaaatcaaaattggaaatacccgaaacatcatgtcaatggcattggctgttgcagatagataataaccgctgccaagacatagcaaagacaatacagtgagccatttcgaataaaccggcaaacttttcggctttttggccgatttaatcagttcaatgatttccagcttccgaatccgtcccagtgataaaatgagcagcgtctgaaacaggatgagaaagccggcaattgtcatcacaaacgctttcggcacaatggcaaacgaaatcggcaccttcacgctgagcatccatgtcataatcataaaaaacagttttgaaaataacaggcctgctccaatgccggccgcaatcgccgcaagagaaataagtgactgctcataataaatcatcttgcgaagctgctgctttgatgtgccaaacagtgtcagcagcccaaactctttctttcttgcctgcaaaaacgctgaattggaatatgtgatgaaaaatatacaaaacacaatgatgacgacaagagctgcgctcaagcatgttttgacaaggcttccgccatatatattgtcttcattgacatcaggatgaaaaataaatgatgtgaagacaaaaaacaccgaaacggcaaacacacagcttaaaaagtaggccacataccgttgcagattcccaagaatgtttttacgggcgatagttctcaaattcatgaaaatcgcctcccaacacactcaaggtatccaatatactttgataaaacacctgcctgtttgttcctctgtgaatctctgaaaagaaacgtccgtctttaataaaaacaattcgtttacagaaacttgctgctgtggcatcatgcgtaaccaacagaatcgtcgcttccttttcctcattcagctgagccagtgtgttcatcacttgctttgccgattttgagtcgaggtttcctgtcggttcatcggcaaggatgagcgccggattgtgaataatcgctctggcacaggctgcccgctgctgctgtccgcccgaaacctcatatgtgcgatgatcgagaatgtgcttgatttgcagcgtatccgccagttcatccaatcgggcttccatttctctcagctttaccttatccaatgcgagcggcaagagaatattttcacgaatcgtcagcgtatcaagcagattaaaatcctgaaagacgaagccgagttctcttctgcgaaacaaagccagctcttggtcctttaacgttttcggctgaatgccgttgatcatcatctcgccctgggtcggcttatcaatggtagccagcaaattcaaaagcgtggtttttccgcttcccgacggccccataatcccgacaaattccccttttgacacactgagatcaaaggcgctgagcgcttggtatgatattgttcctttatttgaatagtacgttttcgataggttcgttgtttgcaacacgttcatgttctgctcctcctttttctttattataaaaaggaagtcagcatcctcccatcgaactttcttgcaattccgctccccaaccttacaatgctgtcacattcacgagggtgtcacttgaaaacacgatggtcatcacagtgccagccccttcttttgattccgcatacagcttatggccgagacggctgcacacctgttttgctaaataaaggcccattccagttgcctctttcatggttcgtccgttttctccggtaaaaaacgcgtcaaaaatccgcggcagatcctgtggcggtatgccgattccttcgtcggcaaccgacaatcgcgtctcatgtccctgtgtttcaatccggattgtaatagggtctcccacaccttgctttgaatattttaaggcgttgaaaaggatttgctcgacaacaaaggaaagccacttttgatcactggaaatctgaacggcatttggcggcacatgtaatgttggaaaaaggcgccgtttaataaactgacgtttttcctgattgatcagtgaacgaaccatttctgccaaatcaaaggtttgcggctttacatcaaatgcaaattcctccagccgagccgtttgcagcatcatatcaagaccgtaacgaaatctctcattctcatcctccagctcctctaagaacgtcggaaaagaggatgaggttccgttttttccttcctgaatcattaaggatatgacggataccggtgttttcatatggtggacccattggttggtgaaggtgtaatgctgtttttgctgattgatatattgtgagagcctgctttcgtattgctgcccgagtgcgttgatcatcttcgtccaaagcacttgctctcctgttcttggctttctggctttcaaagactgtccgatgtcattcgaagaagaggcttgttctgcaagctttttaacatatgtgagaaaggaaatttgccgaacataatcaacagcaaaacctgcggctaaaagagtaccgggcaaaatccatatgtacatcatattttctttggaaggttctgcgccgctctctacaatgcttaaatacgcaatcagcatggcggaccctatccctaataatgaaaatagaataatggctaagcggtcgatgagataagtctttaacactccgcttcatccttccgattgacttgaaattgatagccttgtcctctgattgtggaaatgcaatctgtcagtcctgcattctccagttttctccgcagccggttgacattgaccgttaacgtattgtcatcgacaaaatcaacgtcatcccataacgcctccaatagttcatcacgagagacaatttttttatgctccctcacaaaaatagagagaagctgaaattctttttgggaaaacagaatacggacgctgttccattcggcctcattttgatcaggataaatcgtcagcccgccaagctccactattctagattcctgcggcaaagagggcgagtattcaccatatgtgcggcgcaggacgcttttgattttggccatcactacctctaaatggaacggttttgtgatataatcatcgccgccattttcaatcgccattacctgattcagctcatcggtccgtgccgatataaagataatcggcgcattggaaatggtacggatttgcctgcaccaataaaacccgtcaaaaaaaggcaggttgatatcaagcagcacaagatcaggcttcatttctgcaaattccaattttatatcattcagctgttcagcaattttcacttcatatccgtatttttgaagatgaccgcccagcaaagaagcaatccgctcatcatcttccacaagcaaaatccgatacacgttgatcccccttatatgtacatcacgatgatttttctagaagattccaaaattattatagcatgtgcggaatagtaaatcggtctttttctttttgttatgatagaatgataaaggtaaaattttcataataggcaggtgtcgtgatgaagaaaatcatgctgtttctggcaatgacgtcaattctttcagcatgtcagcccaactataccgggaaatacatagaaattggggatacactaactgactataccaaagagtgttttaaagagaatgaaattccttataaatacgaaaagggaaaactgtatatcccagaagatgcatttgatacagcgatctacacttgttcataagaaaaagcttgcagataacctgcaagcttttcacgttacaaaaaatgagtatttaatttctcttcaaatcctgaagggccgatgtcgcttttttgaatgtcaccgccgttttcatgaatcgtaaaatggcgctctgacatgaccatccttccgctcggcgtcagctttgaggcaagcagggatttgttaaaaggagatttttcatgagagtgaatgatgtccttcatgttatctaaatcaccgagatcactctcttcaagagtaaaggcgtacccgatttgccagccttctcccttgtccatcagcagaacatggctgcccttttctgtctcttctcttttgattcggaatgacccgactggtgactgtaccgtttctccggaaagcggtatcggctggagcgccaggttgatgccgaaaccgatatcaacgaggtaatcgccgttttccgcagacagccatacagcagcatgcgtcccttctagtgcccatccctcttgattgcctgcataaaccgttcctcgaatgagcttcacgtgaaacccggcctcacgcaagacaaaataaaggaaaccatttagatcgtagcataggccgccgtgctgatctttgagcagacgtcgccatagctcttcttttgtgatcttataattctcttttgcaagtacggcacggttttcgaatggaaaacggtatgccattgctttgagaaaaaggggaagatcgccgaagctgacatgatctttctcccagccaattttctgaaagcagtcttttagaaagtcactcatttttatcacctaaacttcttcttgaacgtaagcagccagcttctccagcgcctcttgttcatcttctccctgggcaatcaaggtaacctcagtgcctgtgcttaccgcaaggctcatcagccccatgatgcttttggcgtttacttttttcccatccttctcaagaaacacatctgacgtaaaccggtttgcttcttgtacaaacaaagcagcaggacgtgcttgcagtcctgtctttaatcgaacttccactttctgttgaaccataagatctccccttttctttacggttattttaaagtgacggtttgccctgtccgcagctgttctgcgatttcgtcaagttttctcagcctgtgattgatccctgatttgctgattttcccgcttgctaccatttcccccagctctttcagcgtcacttcctgataatcaatccgaagctgcgcaatttcccgaagtttttcaggcagcgcctccaggccgattctttcatcgatgtatttaatattttccacctgtctcagcgatgcgccgatcgttttgtttaagttggctgtttcacaattgacgaggcggttgaccgaatttctcatgtcccgaacgattctgacatcctcaaatcgcagaagcgaattgtgagcaccgattacgtttagaaactctgtaatcttttcagcctcttttaaataggtaatgtagccttttttccgttcaagcgttttgctgtttaactgaaactcatttaacaggtcacataatgaatcgttatgctccttataaagagagaagatttctaaatgatacgaggaggtttccgggttattgaccgaacctcctgccaaaaatgctcctctcatataagaacgcttgcagcatctctttttgaccagctctttcgaaatacttcgttcaaacacaaaattctccccgagtatttttaaatcctctaagatcgcttttgcattttctgaaaaacgcacaatatagacgttattctttttcagccgcattttctttctgaccagcagctcgaccgacacatcatattgttttttcagcaatgtatagatgcggcgggcaatcgccgcgttttcggtttgaacatcgagtacgagatggcggtttgtaaatgataaagctccattcatccgaatgagtgcagacagctcggcattaatgcagcagtccttcacttccagattcgttaattctttttttgtttctgatgcaaatgacatatagccacctcatttcaaggcttcattctttcagtaaatcaacaagaagagaggccactttatgtgtatcgtgacgtattacgtcatttttatacgttacaatttgatctctgatgacttcaagccccatcgctttcagctcttcgatatcaaaatcaacaggacgcgccgattccatttcgtacttacgttttatttcgtcgggaatgtcttcactgttcactaatatcgtatcaataaaaccgcagcccatatgctgattgagcgctttcacatgatcagcagcggtgtaatggagcgtttcgccgggctgagtcatcacgttgcaaatgtatacttttttcgccggcgcctttatcacttcttccccgatttttgggacgagcaaattgggaagaatgctggtatagaggcttcccgggccgataataatcaaatccgcttccctgattacgtctattgtttccggcagcggatcaatctgttcaggcgtgagaaaaacacgcttaatgcgctgtccgtattctgggatcgttgactcgcctgagaccacgcggccatcttccatctcagcatgcaaaacgacactggcattggcagccggcaaaacctttcctctgacattcagcaccttgctcatttctgtgacagcgtgaaaaaaatcaccggttatatttgtcatcgctgccaaaatcaaattcccgagagaatggcctgttaagtcattccctttattgaagcggtgctgaaaaagatcttcaacaagcggctccacatcggataaagcggcaagcacatttctgatgtctccgggaggcggaattttcagttcattccgcagacggccagagcttccgccatcatcggcaactgttacaatggccgtgatgtcaacaggtttatgctttaggccccgaagcaatacagaaagacctgtaccgccgccaaagattgcaattttcggcttttgtcccatcttatttccggcttctcttttcaatgtcccggtgagtaacatgagtatagtaatcctttttgaaataatcagctaaattctcggctaatgtcacagagcggtgctggccccctgtgcagccgatcgcaatgacaacctggctttttccttctcttttataagatggaagcataaagctcagcagatcaattaatttctcattgaacttttgtgtttcattccacttcatgacgtaagaggaaacttctttatccttgccagtcagcggccgcatgctttcgatatagtacggattcggcaaaaatctgacatcaaagacgagatctgcatcaattggaataccgtatttaaaaccaaatgacatgacatttacggtaaatgtctctccttggtttgtcgcaaagtgcttcacgattttttcacgcaaatcacgcggcttcatgtcagacgtatcgtaaatgatttgagagcggccttttaattcctcaagcagctctcgttccagcgcaatgccttcaagcggcaggccagtcgctgccagcggatgcgagcgtctcgtttctttatatctcgtgacgagaatggaatccttcgcgtccaggaataaaattcgcggtgtgatccacggattttcggccatttcatccagcgcttcaatcagccggtcaaaaaattcgcggccgcgcagatccatcacgagcgcaactttgctcattttcgaatttgattccttcatcagctctaaaaacttcggaagcaatgaaggcggaagattatcgacgcagaaatagcccagatcttcaaagctttggatcgcgacagttttccccgctcccgacattccagttataatgacaagctgaatatcatgtgattcactaacactcatctttctcccccctgacttgtctttctatttgatgtgctgcgggtctaaacgataactgagtagctcaaattccggtgtatacgtaaatgtgccgtgcagcagcccttgtcccttcatcataaaatcaaggatatggccgtctccaggggccataggcaggttctgaatgtcattgacatcgtgccactgcagtttgccctcctctgattcagacacattttgtcctgtataagaatcagcgacaaacgtaaacatcatccactcggagacaatgtggtcaccgtctttaataataaaggtaaaaacgccttttaattgaggatttatgatatagataccagtctcttctctgtactctctgatgacggagtctctgactgattctccgctctccatcttgccgcccggcgcgacccaccagccgcgtctcggcttttgaagcagaagaactttgtcatccgtctgaagcacacaatttgtcactctttgcaagtacgtcacctaaccttcgtcctgtcatcgtctatttattataccgcttcaagatgcctcccacaatgaagagacattgacaatcttttcttctattttacagcatattcattccttaattcagatgattttgctgtaactggaattctcttttatttatggacaaaaaaaggacacggataactggagaatccgtgccaaaaaagtgtattcattataaaaagggggtcaattactttattaatcataaccgaaaagcattacacatgtgttacagcggaattaaaacccagtaacgtaatgtgaaactcgtatgacagccctttttattttaaggttttcagcgtttcttggagctcttcgacataatgctgtacgctttgtgccgcaatgcttccgtctcctgtagccgttacgatttggcgcagtgatttttcgcggatgtctccggcagcgaaaatcccttcaaccttagtttccatgcggtcgtttgtttcgatatagccttcttcattcgtaatgcccaggttttcaaacggtttagacagaggaagcatgccgatgtaaatgaatacgccgtctgttttgaattcactttcttcaccggttaccgtatcgacaagcgttacgttaccgactttgccgttttcctcatgaatttccttcacagttttgttccataggaagtcaactttttcattatcaaatgctctcgcttgaagaatactttgagcacggagtttatcacgtctgtgaacaatcgttacttttgaagcgaaacgagtcagatatacgccttcttcaaccgcggaatctccgccgccaacaacgacaagttctttgcctttaaagaaagcgccgtcacatactgcacaataagatacaccgcgtccgcccaattctttttcgccaggcacgccgatttttttatattccgcacctgcagcaatgatgacagcacgggctttatattcctttgaaccagctttgactactttgtactctttgccgtcaatgacctctttaatatcgccataagcgtattcagcgccgaattttttcgcgtgttcaaacattttgttagaaagctcaggcccaaggatactttcgaatccaggatagttttctacatcttccgtattggccatttgtccgccaggaattcctctttcaatcattaatgtcgataaattcgctcttgatgtgtatacagcggccgtcatcccagcagggcccgcgccgattataatcacgtcataaattttttcttctgacacactattcactccttaaaccatcttttcaagtttgggctctttcttataagataagaatccccatcaaacgtattccttacccatatcctataaaatctcatggtgatacgctatttttttgctcaacacgattaaatgtattcgaaaagggtatatgttaataaagaaagagccttctgttttagaaggcccttgtcatatttattattgaacaacacgtcttacaacgcctttaaatgcttttttccagtaaggattgctcatagagtcaacagatacgccatgagatgtattgtcgtttaggaaagtaccgtttcctaagtagattcctacgtgtccatttgttttgtaagtgtcaaagaacacaaggtctccgcgtttcatttcagacgcgctgacagcttgtcctctgccaactaacgtatcagtagttgttccgcctacaggtccaaggttaacacctgcagaagcgtatgcccagcgtacgaatgatgagcagtcaaaaatacggttgttgatatcagattggctgcgtccgccgccaaacttgtacggagattgtcctacaatgcttgaaccaacgctgatcgcgccttcaattccgccagagttgctgataacagtgccgcctgaattgctgtttgagccgctgctcttcttagaagatgagccgtttgacgaactgtttgatgaaccgttagaagaattgtctgaagaatcatcagatgagcttgcttttgctgattcagttgtcgccgtttgactgtcatctgtttgtgtttcgtcagatgctttttgtgcttcttcctgctttttgatcaaagcagccgctgcttcttgttcttttttgatgcgtgcttgttcagcttcagtatttgctttttgatttgcaagttcagacgcctctgattttaattcagaaatcgctttagccgttttcttctggcttgcttttgcttcgtcgaaaagcttgtctttttcattaagctgtttatcaaggtctttttgcattgtttctaatttagccaatgcagcttgaacttctttcagcttgtcattcaaatccgcttcagaatcctcgagcttcgctttatcctgctcttgctgtttgattaaatctttgtctgcgtccacaatagatgaaaccgcagtcgcacgagagataaagtcaccaaagcttgttgatcctaaaagaacatctatgtatccttgagatccgccgctttcctgtaaagaacgaacgcgttttttcaggatttcattgcgtttttcgatgcgtgcttcagtttctttaatctcttttttcagttttttgatttcttcttttgttttatcattttcttcttttttatcttcgatcttgttacttgtatcaagcgccttagcgttaatgtctttcagttctttttcaatctttgattgattttcctgaagttcagttaattctttttccttcgcttcaatgctggaagcaacctcagattgcttgctttcgattttttgtttcttttcatctaatgtttccgccgatgcagttttacttgtaaatgggatcaaaaaactgcttgtcccgatgacggaagccaaaccaagtgtcaataaactctttctcactttttatatcctcccttttactgtgaacctgtcctcatttggaatcgtattttgaacatcaagtttcgttcctcatactctacgaggaatgatggttgtttatggttaattattctgtgcatctcttattctggttgtatagcgtttatttcacatcatatgtaaaaaacactaattccttatgtacgagaatcattataccatcaagtttcgacaaattagcgataaattttattacatttatgtttcaaacagatgtcaagtcacacatcatttgtcatttttcttaagcgtgcaaaaaaactgtcgatattattttttaaatataatctatcaaacaaaaaagagtcgattaaataaatcgactctttaaaatttactattctagaatatcatcaatatatttcatatatttcgtcaacgttgccggagagatgccgaatcgggccgctgtgtcttttttcgtgtcttgcttgccatgggcttctttccaaatataacagatggctgctgcccagcctttctcattcttcaacggagcagctgcacgaatttgctggatgacatggaaaacccagcagctcatgacttctgttttcatctcttctttttcagcttgctctaatagtttgaccgtttgataggcgaaaagtgcatcctctgaaacgtcagcagccgcggaatctccattcagaagcagctttacaaaatgattttcaaaaggagcggtgattctctttgagcgtatcaccgcttcaagatgctccgtttctccctttgtgctgctgatataataggctgcgagacgctgttccacagatgaaggaagagcttccctccgctcaatccaaggcgccgggcggtcttcgccgggatattgcgactcgacttttctccagatcgtctcggcaaagtcggtatgtcccgtaaaataagcagagcaggaaagccagtaaaagaaggtgtcgtcaccttcaaagccggttttatataatgatttgagccatttatatccgatctcgtagcggccgacaagcgccaaagtagcacccaatttataacgctgctccattagcatcggatagacattggagagctgatcactcaattccaccactttttcgtcttctctttcataatagtagaaaacgagaagattgcataaggcgtgaagatttccttcattatgagaaagcacttcataagcggtttgcttcgcttttacaacgtttcctgaatagaaataggcaagcgcgagattgttgtatgctgaccaaagctccggatattcagctgtgatttcctcaagcgccgcaaccgcttcagcaagctggccgctttccagcaatgactttgcccgatcctgtttcaccagcagttcatcctgatcatacaacgaatcctcaatgccgtcgtctcctaaatcgagcaaatcaagcagactatcgttttcttcggcgaattcaccatccgggtccgcatcagaataagcggccgcttccttataagcttcctggaagagccccagatgggcaaagttattcgctttaaagtaatggcactccggcatttcggcctccagatttgccatgatatagtcaagaagatcgttcgactcttgatattggcccatttccgaataaatgaccgcaagctgtgaaagcatctctgaatcctccggctccaaatgaaccgcgcgctgaatcagtttgcttgcccgttttagattgcgctctttatacgctttcaagcctttatgaaaaaaatattgtccatcttgaagcagctggacaatttgtgcgtgatttttatgttcagaagtgtgttttcccacaactaccctccgttttatacaatattaccgtcagtagtataccataaatcgtaagcccctcaatagttcaaaaggaaggattgggaaaatccctcctcttttttattggctgattcgaccagaatttacccggctttgttttctaagtccgcattcattttcagctgctgttcagcaaaatccctataaagaccatgggaagccattaactcatggtgtgttccacgaccggtaatttcccctttttcaacaaacaaaagctggtccgcatctacaacggtagataggcggtgagcgatcacaatcgttgtgcggccctccatcagcacctcaagcgcctgctgaactgatttttcagattggctgtcgagacttgaggtcgcttcatcgagcataagaatgcttgggttacggagaagcgctctcgcaattgcgattctctgcctttgtccgcctgacagcataatgccgcgttcgcctacttctgtatcaaactgattcggcagctcctttataaaattgagcgcatatgccatctccgcggctttttcgatctcagcatccgtcacatctcgttctaacccgtagcaaatattttctctgattgacccggacattaacgggctttcctgcgatacatacccgatatgctccctccacgattcaagcgagtaagtatcgaccggctcgtcccccagtcgaatggtccctgcagtcggagtataaaaacgttcaagcagcttaaacagcgtcgttttccccccgccgctcggaccgacaatagctgtgactttacctgcttcaatgacggcgctgatttcttttaaaatcagctgatcaggcttgtatccaaaagacacgcgatcaagctgaatagggagatgcgcattttcaatttgttttcctgtcactgtatcttcttcttcctctgctaaaatctcaatcattcgttctgttgcaccgattgatttttgcagctgtgtgaaaaacgttgtaatctggcccatcggcattataatttgaaacaaatataaaataaaagccacgagcgctcccgccgtgagttcgcctgaagatacctgcatgccgccatatccgatcactgcgacaagcgctgccattagcacgagtgagataagcggaccgacaagtgattgaaccttagcttctcgaacgccaagcttaaataatgatgaaatccctgttttcccgcggccgtattcgacatcctccgcatttgaagctttgacaagtctgatttccgggagaatttgattcagcaggcctgtaaaacgggctgtttcatcttgtgtttcccgtgaaatggagaacattttccgtccaatcggcaccaaaataagagcggccagcggaacgaccactaacacaagcagtgtcagcttccagttcataataaacaagattgtcaatgatccaatgacagaaatgatgcctgtaataaatccgctgatatgggttgtaatcaattctttgaccaccatcgtatcgttcgttacacggctgactgtttctccggaagcatttgtatcgaaataagagacaggcagcttaattaatttcttccataataactcccgcagcccggaaatgattttttgtccattatagttaagcgcataggtggcataagcgcttaaacccgcctgaacgaaaaacaccagcgcgatcaaaccgatttgcgtgcctgacagatttgacatagaaaaaccatcgacaagctgcttcgttaataatggaatgagcaggctgaccagcgtggttactacactgagggcaagcgcaaaggcgagctttccataagaaggattggtccgtcttactaaggcaaaaaagggtttcaatttacttttagatttttgtttcttggttggcatatattttcctcctgtttcagcgttcagaaaggtgaaaagtcatagcaaaaggatgatttttactctttctcaatcatatcaatggagaaagactttttcagtatatttttgccgtgatcaaaataaaaatctcccactcattgtttgaataggagatttttgtgttagacatctttcactggcttcttttttctgtaagtcaatgttacatcctgctgtcgcaggtcttctattatcattttgtaccgatcaacttttgcggtatgttcttcttttatcatctgaagggcagcttttcgtttttcgctattagactcaagctctttttttattttttttacaatcaaccctttttgccctttgatttcctcttttaatgaagactcaaatttctttgtcaggctgagaaagtcgttgatcggttgattgagggtgcccgctttccccttcatttcatcttgggtaagaaacatataggtcgttgatacaatttctgtttcactttctgaaaataaggaagtcactcttcatattcctcctaagactgaaaatcaaataactgagaaatcatttcttctttttcaaacagcttttcaatactctcgcggatatttttgataaaatctcttttttctgttgtctgtttttttaattcagcaacaattccatcattagcaggaagcgcacctgtgtggaatgattcatgaactgagattttctccaatttatcgaatgtgtggctgaaaccagctgcaagccggaattgaagatcgaaggcataatgcgaagggttttcttccatatgatgaatagccgtgatgatcgcctgctttttgtctatgaagtcttcatcgatttcctgactgtaaaccttctggtacttagaaatcgcatcttccatatcttcaacgattttcataccgttttgatagattctgacagcggatgagagattgacttgaatcgtttctcccgagccactcttccctgtaaaataaatatcggagcctttatagctgaagcctttttcctttgacaaggcgttgagcatttgaacgatgctgtggccgtcgacgataagttttagtgcgtcttttgtttctgtgtcgagtgttttcaatgaggacagaattgattttacatagtccactatttcaccaacgtcttttaaagcttgcataaattggccatattttagatggtctatgaaatgttcgtaccgtgactctatgcctcgcatactcgcattaatattcgttaattcttttttgatgactttcttttgcgtttcatcaatataaccattttcagctaactgatctacgaccggtccgctgtttctcaacaaggtatgaagaaaacctaaaaacgacggcagttcctcttttattcggccatacatttgcttaacatcatcaaaatgctcatataggacacttactttctttaaagcgccgtctgtgtttttcactttttcaatcaggtctatgtctatcccgctggctgcctttataaaaccgttcaagccgtctttttcatagtcatccttatatttttgaaggaatttttgaattgacctcacatcttcgtcaggaaccccatccataatgtttcggatgccttttacacttgtatttgtatctgccatcttcacatcaccgaatgtaataaaatcggccttgccgctgactccatacagcgggtcatcttttgagatgcgctgagtgatgtttgttgttacgcctttgtcttcataatatttttggatttctttttttaacttttctggcgggatggaatctatatcttcatatttataactaaatttcctaataacatatctatataaactttcatcagtttcaagtaattgatcaatattgacttgagctccatttaccccataaacttcatcatattctccatcaatcaattgcaccataacttggttattatttgcaagtgaatgtcctaaggcgaatgtttttaaatcctcagagttacctgctgctttctttgctttgttagtaaactcctttgtagcctcatactgactatgatcaattcctaaaaaaagaccaaaaaagttatatgaccaatccttattatcggcactaccttctgaaataatctgaagctgatcaatatgttttttctcatctattatatggattgccgttccatcgtaacctgattctctggtcgaactttgtatacttgtattctgatttacaagttcattggaggtgtaaatttcaattttcatattctcaggaagatcgtggtgggtttcctctttataaattctgcgtatatctgcttcgaaatccttcttagctttcttaacttcactcgcaatagttgaggcaaacttttgtttatagtcatattctaaatcaattaaccttaactttacgttctcattctcaaatacatttttatttcccatcttatttctcctttttatctattaaaaaggtgatagaattaattaatttctcaactttatttttagccttttcttcatctaaggagcatggttgattttcatttttgcatccaagggtaaaggcgtattctactcctaggttatcttcctctgtagacttaacatatccaaaataactgtatgaataattatattttctatcaatatcgtcaaagatgtcttttttcttggcagtgtaaatatccgttttctttttgctgctttttttgtattcgcctttataatcattttttccactaacaatatctagcattgtcttaggttcattcgcaaaactttcttctttgtaatatgttacatggccatcaaacattacattggtgtctttatcataactattaaatccaatactttctttgtttttcccggttaacgatgatcttcttgatagatactttccatcctccggaaacaacatcctaaaccctttcagcttagattccagcaaataatatcctggttcctcttcttttgttgacaccatgtactctctcgttttctcgtcctgaaacgcaggtacttgaggcagatccttgggatccatgtcttttggttttaccgcttctgttttattgtcatttgtgctgtttttatcattgtcattcatactgcatcctcctgtcagggcaagtaataagctgaagcaaataaagatgatctttttcattacgaacctccacgggttttgtgagaatagtattctatttttatatcaaaaataattctattgacctggttaagagatgattatttcatcctttttcatgttacatcatggcggaatttggataaataggaaatgagactcggttttgatctccttttattaactaatcatatataacacccaatataaatctaaatacctattacttttttcacaaaacaaaaagagccgtatcatccggctctttactcttcaatctcagaatggcgttttttcaatacgtcaagcacatcatccagcggcagggattgttctctgagcaggacaagcaggtgatacagcaggtctgccgcttcccatttgagttcctcatgatcccggtttttcgcggcgatgatgacttcggatgcttcttctccgacttttttcaaaatcttatcgacgccttcacggaagaggtacgtggtgtaagctccttcaggcatttccgcttggcgttccgcgatcacccgctccagttcgttcatgatgccgaatcggtccgcggcctgttcttctgtttgttcctttgtaaaacagctgtagctgccagtgtggcatgccgggcctgacggttctacgagtacgagcagcgcgtcttgatcgcagtcataccggatacctttgacggcttgcgtgttccctgaggtttctcctttatgccataacgcttggcgtgagcggctgtaaaaccatgtttccttcgtttccagcgttttttcgtacgattccttgttcatatacgcaagtgtcagcacttctttgcttgccgcatcctgcacgatagcaggaattaatccgtcctcgttaaaacgcagttcatctgcctgtttcatctcacattcaccccgtactctttcaagtatgatttcacttctttaatcgatgtttctttataatgaaaaattgaggcggccagcgcggcgtcggcttctccttttgtaaaagcctcaagcatatgctgtgcgtttcccgcgcctcccgaagcgataacagggacggggacagcttcggaaacaagctttgtcagcgtgtggtcgaaaccttttttctcaccgtcggagtccatgcttgtcagcaatatttctcctgccccgcgtttgacgccttcttttgcccacgcggtgacctcccaatctgttttctttctgccgccgtgcgtatagaccttatatgtgtcagattctttgtcatacttggcatcaatggcaagaacgatgcattgcgaaccgaaaaactcggctccttctgcaatcagctcagggcggagaacagctgccgtgttcaccgacactttgtccgctccggcacgcagtatcgttttcatatcactgagctgattgatgccgccgccgactgtaaacggaatggcaagcttcgcggcaacctgctccacaacgtcaaccatcgttttgcgtccttcatgcgaggcagaaatatcaagaaaaacgagttcatccgcgccttcccggtcgtacacttccgccagttcaactgggtcaccggcatccttcaattcgagaaattgaattcctttgacaacgcgtccttctttgacatcaaggcatggaataatccgttttgtgatcatttgcgcttcaccctttcaagcgcctcacacagcgtaaactgattggtatacagcgcttttccgatgatcgctccagagacgccgtccgcctcagagcgggcgagagcttcgagatccgcgacggagctgactccgccggaagcgatcaccgatttccccgtttccttagcaagctcgaccgtgcttttaacattggggcctgacagcattccgtctgtcgcgatgtcagtaaaaataaagacttccgcaccttcattggctagctctttgcccagttcagttgccttaagggttgatgtttccagccatccctctgttgaaacaaaaccgtttctcgcatccagtccgattgcaattttctcgccatattgtttcagcatttttttgacaaacggagggttagaaactgctgagcttcccaggatcacccgatcgactcctgctgataaatattcatagacgtcattttcggaacggatcccgccaccgatttcgactttcaggttcagcttttgcgtaatctcaatcacatggcggtcattcactcttttcccttctttggccccgtcgagatcaacgagatggatccattcggcaccctctttcgcaaataactcagccatgtcgtacggtgaatcgccatatatcgtttccttattataatccccttgaacaaggcggacacatttgccgtttctcatatcaattgccggatataatgtaaaagcactcattttttcaccttctgttctgctgccattttcgtaaattgagttaaaatagacattccgaccgtgctgcttttttccggatgaaattgggcgccgaagacgtttctttttccgactacagcaggcactcgtacaccataatcggcgcttgccagaagcgcgttctcctccatcccgtcaatgtaataggaatgaacgaagtaagcgtagccttgttctgtttcagacagcagcggagattcgttatgaaaggaaaggaggttccagcccatatgcggaaccttcagcttgtttcctttttcatcttctgctttcagcctgactgcttttccttttaacagcccgagtcctgaagcggtgccgttttcttcgctttcttcaaataaaagctgcatgccgaggcagatcccgagaagcagccttccctctgagaccatatcgtgaatcaattgatcaagcttcgtgtagcgcaaattgtccatcgcgtctccaaatgaaccaactcccggcaaaatgaaggcatcagcttctttcagctcctccggcttttcagaaacaaaatacggcacgccgacacgttcaagcgcctttgagacactgtataaattccccattccgtaatctatcacgccgatcatttacagcatccctttcgttgacggtattcctttaactcgcggatcgatcgttgtcgcttcatcaagcgcacgtcccagtgctttaaaaacggcttcaatcatgtggtgggtgtttgtgccataatgaacgatgacgtgcaggttcattcgagcttcgagcgccagcttccacaaaaattcatgtacaagctccgtatcgaaagttccgactttagcagccgggaaatcagcgcgcatttctaagtgcggccggttgcttaaatcaatcacaacttgagcaagtgcctcatccatcggcacaaacgccgatccgtagcgtttgattccttttttatcgcccaacgctttgagcagcgcctgccctaagcagatgccgatatcttcagtcgtgtggtgatcatctatatcaacatcgccttttgcgttaatggaaagatcgaattggccgtgtttcgtgaataaatccaacatatgtgtcataaacggcacatctgttttgatatccgcttgtcccccgccgtctattgtaaatgccagttcaatatctgtttcgtttgttttcctgacgcgttccgcttttctcatttagaaatcctccgttctctcgcttcaattgatctggcatgggcttctaacccttccagtctggcaaaagccgcgatgctttcggcatgttcttcaaaggctgattgactgtaagaaataatgctcgatttcttttgaaaatcagttacgtttaatggacttgaaaatctggctgttccgtttgtcggaagcacatggttcggtccggcaaaataatcaccgacaggctcagggctgtatctgcctaagaaaattgcacccgcatgtttgatactgccaagcaaagcttccggagactgtgttatgatttctaaatgctctggcgcgagtgtattgacagtattaatcgcttccaccattgtttccgccacatatatacaaccgtaatctctcactgaagcttccgctatttctcttcgcggcaaggttttcagctgcttactcacctcggctgaaaccgcctcggccagcgccatggaatctgtgacaaacacacatgagctgagcttatcgtgttccgcctgtgacagcagatcggctgcaatttcgctcggaatcgctgtttcatcagccagcacgacgatttcactaggtccggcaatcatatcgatatcgacatcgccgaacacttctcgtttggcaagcgcgacataaatgttgcccggacccgtgattttatccaccggttcaatggtttctgttccgtatgctaacgccgcaatcgcctgagcgccgcccattttgtaaatatcttttatgcccagctcggctgcagcaaccaaaactccaggagacagcagaccgtctttttccggaggcgtgacgagaacgattctttcaacgcccgctacgagcgccggaatcacattcatcaaaacagatgaagggtatgcggccgttccccccggcacatatacaccggcggaatccagcgccgtcactttctgccccagcattgtgccgtcctttctgtgataaaaccaggaggattgcagctgtctttcgtgatattccctaatattttcgattgcctgcctaatcacctgaagaagacgtgaatccagtgaggtgtatgcctcctcaaattcttcttttgtgaccagcggactgtctatttcgatgccgtcaaatttcgccgtgtagctgcgaaccgcctgatcaccgtttgctttaacatcttctataatggaccggaccgtctttctttgctcttccgttccggcatcgatggaacgcttgagagaaagccgttccgctccgctgatggttttgatcttcattttgccgtctctccttccacaacgagagataggcgggatgccatttcgtcaatcacatcgtctttcatgcgatagcttaccgggttgacaataaagcgagaggtaatgtcacaaatgtgctccgtttcaacaagcccattttctttcagcgtctgtcctgtggaaacaatgtccactatccgatctgcaagcccaatgagcggagccagttcaattgaaccgttgagcttaataatctcgacttgttctccctgctctctgaaataactggaagccacattcggatactttgtcgcgattcttggcgctactccgctccagtctgtattcggaagtccggcgacagctaagtggcatttgctgatttttaaatccagtacctcatacacgtcgcgttcctcctccagcatgacatccttgcccgcaattccgacgtctgccacgccatgctccacatacgtagttacgtccatcggcttcgctaatatgaaacgaagattttcctccggcacatcgatgatcagttttctcgaatcttcaaactcctcagggagcctgtagcctgcctgcctcagcagccctgccgcttcttcaaatatccggccctttggcatcgccattgtgagtaacttacccattttgctcttcctttctggcaccgataaaataagtgacgtttgcaaaagattttgtcatctggtcgatattttctattcccgataaatcttgaagaaccactttgttccctttcatgcgttcttcattcgcataagcgatggcttgcgcccgctgctctttgctgaaaataacagcgtctatatcacaaggttcttctttcatatgaagggcttcaatcagccggtcgatccgaagcccgaagcctgttgccggtgcaggtgaatcaaaatggcccagcagcttgttgtaacggccgccgcttccaatgacaaaaccgacattctcggcgtacacttcaaataaaatccctgtgtaatagctcatgtggctgaccatattcagatccaggcggacattttccgtacatccgtaatcctcaagaatgtcccacagcgccttcagctcatcaaccacgctttttccttgcgcagaatcgacgatttcctcggcacgtccgcatacttctataccgccccgcagttcaaggagctcaagcagcctgcttttatcaatggaggaaagcgggagagacttgacatgctctctgtaaccgacgtagttcttttcatataagaacctccgcagcacatcagctcgttcaacgttcccgagcacctcaacaaacaaagcatccgcaatgccggcatggccaatggcaattttaaaggatgccagcccagcgtttttcaatgccccgacgactaaagcaatgacctccgcatccgcgctcgttgtgccgtcaccgattaactccactccgacctgctcgaactcagccggacgtccgccttcacgctcctgagccctgaatacatttgccgcatagccgactcttagcggatgaccgtgtttcagaagcttcgatgccgccacccttgcaatcggccccgtcatatccgggcgaagcaccaatgtcttgccgtcctgatcaagtagcttaaacagctgctgctcttcaattgctgactggacgccaaccgtatcgtaaaactccagtgtcggcgtttccataaattgatatccccatttatcaatcaaatcggttaacgatcgtctcaccttttttttcgtttcgtataaaccgggcagtgtatctctcatgccgtgcggtttttcaaacataaacatcaacccgagcacctccgctgttatcttatgaaggaaaattccgaatcctttagttcgctaatatgataatatgttagcagatgaaagaatgaaaatcaacgcttaacttcagtaaggatatttttagttcaaatatccttctcctcattatgaaaaaatcatgaataatgtattaaaggtacgtaatatctcaaattctttatgtttggcatgctataatacaaatcaaatagagaacaaggagataaagatgaaaacactgcgaactctatgtgtcctgatgattctttcaggcgttatttttttcggacttaaaatagatgcaaaagatatagatattccttttttgaacagccttaaaaaagtggtttctgatagcgatacagatacaggtgcgaatagcaaaaaggagctgaagggaagcgcaaaaccgctggatgtcatcctttacaatcaaatggacgcaccccggctctataacggctgtgaagtaacaagccttgcgatggtgctgaattacgcaggatacgacgtgacaaaaaacaccctggcaaatcaggttgccacagtgcctttgacatacagcagcggattaaagggtgatccgaatgacggatttgtcggggatatggcgaatggccctggtctcggtgtctaccatcgaccgatctatcagctggcgaaaacctatgcgggagacaaagtgtctgatctgactggaaaaagcatttctgctgtttatgaacagcttgaaaaaggcaatccagtttgggttattacgacagccaactttacgccagttgacaacatgcagacatggaaaacaccaaacggaacgatagagattacgtacagcgaacacagcgtcgccgttacgggatatgatgataaatatgtgtatctcaatgatccgtatggctataaaaacagaaaaaccgatagaacaagctttgaaaaagcgtggaaacaaatgggcagccaggccatagttattcaaaagtaaacgcctgaaagccgcactatgctctatcctgagcaaatacgacaatattcatgctttttgtttcaatcggtaagatcgattcattttccatttatcatccagaattatctttactttcaggctgtctgtttttatgattaaagcagattcagccttgccccgatctatgtgagagaagccggtgcaagtcgctgacgcttctcttgcaaaaaatgaaagatatccggggaggatttatcattgaaaaaattcgtgtctatcctatttatgttcggtttggttatggggttcagccagtttcagtcatcaaccgcttttgcagcagacaaagtggtgcacgaaacaattatcgtaccaaaaaatacaacatatgacgggaaaggacagcggtttgtggcagggaaagaattaggcgacggaagccagtcagaaaaccaagaccctgtttttcgtgtggaggatggtgcaaccctgaaaaatgtggtgcttggcgcccctgccgctgatggagtacacacttatggaaacgttaacattcagaatgtgaaatgggaagatgttggtgaggatgcgttaacggtgaagaaggaaggaaaagtgacgatcgacggcggttctgctcaaaaagcgtcagataagatattccaaatcaataaagccagtacattcacagtgaaaaacttcacggcggacaatggcggaaagttcataagacagcttggcggttcaaccttccacgttgatgtgatcatcgataagtgcaccatcacaaacatgaaggaagcgatattccggacggacagcaaaacaagcacggtcagaatgacaaatacacgctactctaatgtcggtcaaaaatggattggtgttcagcatatttacgaaaacaacaacactcaattttaaccaaaaaagtccgctgatgttattcagcggactttttcaatctttcttgcatttcttccttcgtatagatgatcctcatcggatttccgccgacaaatgcgccggcaggcacgtctttatggacaagtgttccggcggacacaactgcgccatctcctattttcaccccgggcagaatggtcgtgttggcaccaatcatcacttcgtctccgatcagaactgtgccgatccggtattcgtgaatcaaatactcatgggccagaatggtcgtattgtacccgatgattgtatttgttccgactgagatcttttccggaaacatgatatctggcatcaccatgagggcaaaggatgtctgatttccaaccttcatccgcagaaatgtacggtacagccagtttttcatccctataaacggcgtatatctcgcaatttgaatgacaatgaaatttttgacgacctttaaaaaaggtaccgtttgatagacatgccacagtgagttggcccccgagaccggatgacgatctgtttttctcacagattacttcactccaacgatttgtaatagatcactcattttctcaagcataaaatcaggctcatgcttcgccagcatttccggccctttaatcgtccatgcgactcctgccgtttttgtaccggcgtttttgcctgccagcacatcgtggtaattatctccgaccataatggcttcctcgggcttgcttcctaactgtttcagcgctaacagcacaggctcgggatcaggctttgcatttgtcacatcatcaagggtgacaactgtttcaaagaattcgccgattcccgtgagcttgaggcccatattgacagtatctcttaattttgttgtcacaattcctaatgtaaagccggctttttttaatgcatccagggtctcatataccgtttcatattcagtcacgagtgaatcatgcatgtcatgattgtacgctctgtacatagcgatcatatcctcgcatttatcagggtccatcgaagagaacgtttcaaaaagagacggcccgataaatgcaaggacatcttctcgtttatacttgctcggataataatgctccagtgtatgcaaaaaggacgcgataattaattcattcgtattaataagcgttccgtctaaatcaaacagaatcgtcgttacttgtttgtcactcatattgcttcctttccaaccgctgagggtttccattttttccacgtgtgcgcaatagccattgtcagcagaactgctgtggtgacacgaatcaaaagaagcggccagactggtatgccgagcggaataaagacaagtgtatcttccacgaccgcgtggcaggcaacgagaaatataaatgccaatgtcatatcccgcttgctcacgccgtcatcctcgacagctttgatcatgacacccgctccgtaggccagaccaatcgtcagtcccgccaccatcgtcatagacgtatttttattcatgccaagcagctgcgtaaacggcgacagccacctggaaaaccgatgcagccagcctaaatctcttaaaaactggatgataatcatcagcgggatcactattgccgccagctgcaaaacaccaagtccggctttcgttaatgcttctgccaacattcctagccagctgtctggcgccgcgctcttcgcagcgataaaaccgtactgcgccgtttcctttccgccatgccaaatgaggttgatgacgatggctgacacagcggccaaaccgatgcgcacggccaatatgacgccaattctgataccaacctttgcggcaactgtcgattcgataatcaagttatgacagaaagaaagcataacagctaaaataaagacttctttcacagataaatccaatgttaaaatcccggcaattcccgcatacagattcagcatatttcccagtacaagcggaatggccgcttcaccagaaagcccgaagagacccattaccggtgtgatcagccgtacaagccaatccatgacaggggtatgctgaagcaaagtgaccaatagcgttaccgggaaaatcactttacccagcgtccatgttgtttgaaaacctgctgcaagaccggccagaaagatcttcttcatccctcatcccctttgttgacgtctactccgcgtaccgctccttcgaatatcccttgacgcgtctgaagatgatggctgccacagccaaaacaatcaatacgattgaaatcacctgagcgatgcgaagtgaatcagtcagcattaagctgtcagtccgcattccttcaataaagtatcttccgattgaataccaaatgatatagatcaagaacatctcgcctctacgcaaattcactctgcgcagcagcagtaaaacaatgacgccgacaaagctccatagtgattcatataaaaaagtaggatgataatattgcccattgatatacatttgattgatgataaattcaggcaggtgcaggttttctaaaaaggctctgctgacagcctcgccgtgcgcttcctgattcatgaagttcccccagcgcccgatcgcctggccgagcaaaatgctgggcgcggcaatgtccgcaagcttccagaacgaaagttttttcactctcgaaaacacataacccgttaaaatggcgccgattaatccgccatgaatggcaatgccgcccttccaaatcttaatgatttctcccggatgtgccgcataatagtcccattcaaaggcaacgtaataaattcgcgcgcaaataatcgcaattggaatggcaaacaggacaagatcaataaacgtatctttctgcagcccccgtttttcactttccctcatcgcaatccacagcccgagcaaagcaccgagaccgataatgattccgtaccaatggacggctaacggccccagctgaaatgctatcggattgagtggttctatcgcttcattcatttaacgccaactcctattcttcttgttcaccgtcttcaatgacgtccgccagcttgttggtaaattgttcagcggcattcagccccatccgcttcaatctgaagttcattgctgccacttcgatgatgactgcaagatttcggcctgggcggacgggaatcgtcagttttgtaatttctgtatcaatgattttcatggtctcttcctcaagtccgagccggtcgtattgcttgccctgctcccagagttcaagattcatgacaatcgtgattcgtttattgcttctgaccgcgccagcgccaaatagcgtcatcacattgataatgccaaggcccctgatctcaagaaggtgctcaattaattccggagcgtttcccacaagagtatcctgatcctcctgccgtatttcaacgcaatcatcggcaacaaggcgatgccctcttttcacaagctccagcgctgtttcgctttttccgacgccgctctttcctgtgatcagcacgccgacaccatatatatcgactagaacgccatgaattgctgtggtaggcgccagcctgctctcaaggaagttggttaaacggcttgacagtcttgtcgttttcagcggcgatctgaggacaggcaccccatttttctcggaggcgtcaatcagctcctgcgggatgggcatatctctagaaagaataatagctggtgttacatcagtgcacagagaatccattcgctgttttttctcctcttcaggaagctgttcaaagaaagaaagctctgtttttccgagaagctgcacgcgctctctcgggtaatatgtaaaatatccggcaatttcaatgcctggtcttgataggtcactcattgtaatcgggcggttaattccttcttctccgctgattaattccaaattgaactgttccattacgtcttttgtgcgaacctttgccacgatatgttcctcctgttccgggctgccccgagcttgctcacaatactttcattttatcactttcaggcttgaacctaaaacagattttataaaaggcgggaaaacacctcagctggtctagatcactagtctgaaaaagagtaaaataaaggtattcaaattccagaaaggcggatcatctatggcagagagtcttcttatcaaagacattgcgatcgtgacagaaaatgaagtaatcaaaaacggctatgtcggaatcaatgacggaaaaatcagcacagtctcaacagaacggcccaaggagtcatattcaaaagaaattcaagcacctgcgaattccgttttgcttcccggcatgattgacattcatatccacggcggctatggtgcagatacgatggatgcaagcttttctgcgctcgacatcatgtcgtcaagactgcccgaagaaggcacgacgagctttttagccacaacgattacccaagagcatgggaacatttctcaagctttggtgaacgcaagagagtggaaagcggctgaagagtcctctttattaggtgcagaactgctcggcattcatttagagggcccctttgtttcgcttaaaagagccggagcgcagccaaaggagtggattaggccttcggatgttgcgcttttcaaaaagtggcagcaggaggcaggcggactgatcaaaattgttacacttgcgccggaggaggatcagcattttgaactgatccgccatttgaaagacgaatcgattatcgcatccatggggcacacggatgccgattccgcattgctgtcggatgccgcaaaagcaggggcgagccatatgacccatctgtacaacgcgatgagcccgtttcatcaccgagagcccggagtgatcggaacggcgctggcccatgatgggtttgtgacagagcttatcgccgatagcattcactcccaccctttagctgcaaagcttgcttttttggcgaaaggcagcagcaagctcattttaattaccgattccatgagggcaaaaggcctgaaagacggcgtatatgagttcggcggccaaagtgtgacggtaagaggacgaacagctcttctttcagacggaacccttgccggttcgatcctcaaaatgaacgaaggcgcacggcatatgcgtgagtttacaaattgctcttggacggatatagctaatataacttctgcaaacgcggccaaacagctgggcatctttgaccgaaaaggcagtgtgactgtgggaaaagatgcagatttggtgattgtcagcagtgattgcgaggtgattctcaccatttgccgcggaaacattgcatttatatccaaggaggctgaccagatatgaaagtaatggaatgtcaaacgtatgaagagctaagccaaaaagcagccagaataacggcagatacaatcaaagaaaaacctgatgccgttctcgggttagcgacgggcggcacaccggaaggcacttatcgcgagctgatccgcctgcaccaaactgagaatctctcatttcaaaacgtcactacagttaatttggatgagtacgccagactttcaagcaatgacccgaacagctatcacttctatatgaatgaccgtttatttcagcatatcgacagcaagcctagccggcattttattccgaatggaaatgcagacgatttggaagccgaatgcagacggtatgaacagctagtcgagtccctcggcggcactgacattcagcttctcggcatcggccgaaacggacacatcggctttaacgaaccgggaacctctttcaagtcgcgaactcatgttgtgacattaaatgagcaaacccgccaagcgaatgccagatattttccttccatagacagcgttccgaaaaaagcactgacaatgggaattcgaacgattctctcaagcaaacgcattctgctgctcatttctggaaaaagcaaagcggaagctgttcgtaagctgttagaaggaaacataagcgaagattttcccgcatctgctttgcacctgcattccgatgttacggttttgattgatcgtgaagccgagtcattaagaccttgaaaggaacatgctgacttatgaatatcaataaacaatcgcctattccgatttactatcagattatggagcaattaaaaacccaaattaagaacggagagctgcagccggatatgcctcttccttccgagcgcgaatatgccgaacaattcgggatcagccggatgacagttcgccaggcgctttctaatttagttaatgaaggcttgctctatcgcctgaaaggacggggcacctttgtcagcaagccaaaaatggaacaagcacttcaagggctgacaagctttaccgaggatatgaaaagccgcgggatgacaccgggcagcaggctcattgattatcagcttattgattcaactgaggagctcgcggctatattaggctgcgggcacccctcctctatccataaaatcactcgggtgcggctggcaaatgatattccaatggcgattgagtcctcacatattccgtttgagcttgcgggtgaattgaacgaatcgcattttcagtcgtcgatctatgatcatattgaaaggtacaacagcataccgatttcccgtgcaaaacaggagcttgagccaagcgctgccaccacggaagaagcgaacattcttggtattcaaaagggagcgccggtcctattaatcaaacgaacaacatatctgcagaacggaacttcttttgagcatgcaaaatctgtatacagaggcgaccgttatacatttgtccactatatggatcgtctttcataaaaaaaaagcctccaaccctttttaaggattggagacatggcgaaaatcaaactggtctggtgctggacgatatgtctcttttttcgtcttgaacttccagatcggtgatttcgttttgccattaaaactgtcttccactataatgtaccaataataaacagactgcggttcaagatgatcccagcggaattcagctgtatccccgctcttcacttgctcccgttttccgagctcttcattggtatatacgttacattcaaaataatcggtttccacctttttgattcttggcttcaaatcaagcgaaagggaaaattcatccttgttgccataggtatccgtatcatagtaattcttatcctttacatacggagaatacgtcgatacgtgcaccatgtcattggcctggtcaaattgaagcaaacgcaaatacccttgaccgccttctggcccgccctgataatcggccagcatttgatgcacaagacgatccggcttcccatcaccatcatcatccagctcatctgtttttctcatcgcactatgataatgcccgctcaataccatcacgacattcgggttcggctttacgatttctttgaatattttctctccgattgggcttctgtttccgctgaccagcaaatactcatgaaaagctaaaatggccatccggtcagggtgtttcttcagcacctgattcatccacgcgatgtcttcatccgtaatgccccatcccatgtacagcatgatataatcattgccgttgctagaaatcaggtcataatgtccgcggttatttttataggaaccgccataatgcaattttttatcaaaacgatcgctgccaaaatatttgccaaacaccctgtaggagccgtccttatgtccgacatcgtgattgccggccagcactccgtaaggaattccgctcttatccagaacggacattgaccgatcagcgtttttccactgtctgatatcggcggaatcatctacaatatcacccgtgtggaacacatatttgatattgagctgcttttgattatcttttatccattcggtctgtttatcaaaaatatgcggatagctttcggcgtaatactgtgtatcagacatccagacaaatgtgtacatatccttcgcaggaggaatttcatcctgtacaatcacattcattttcgactcccgtacaaaatcggcggcaatcacagacgctttcagcgtaaacggtttgtcatccttcgcgacgaagctgtcaacaggctgccattcgtttgtccgataattccaagcatacatcgtcacctttctccccggcaaagaactgcccttccagaccgcttctgccagatcattctcatcaattgatggatcaaccgtcacttcaaagcgatgataagggaaaagctctttgttttctgtcgatactgtttttccatcagcagctgatacccgctccaattctttattcgtaaatggggtctccctttccggcacaaagcttttcggcggttcagtcagtgacgcgtgcttaaatattttcacatgattgcgcgctgtatattgaaatcccctataaaaaccaacatccatggcgtcattcgtcggatctttcacccgtacagaaagcttggccttatgcgtgtcggcttcgctgtctataacctccggctggtccggatgctctcgttcggttttaaatatcctctcaatcactgttttattgcccgcgagatccgttgctgtcacttttagagaatgttttcccggcaaaaggtcagaagatgatgtatgatatgggagtgtaatgctttctccatctaaagacgcttccgcttcctcaattttgctccatttatcatacatatccgcctgcaggataaggtttcctttatacgtttgcccctcggtgatattcggctcaatgtgaggtcctgaattatctacccgtacaaccaggctgacattttccttgccgtcgcttgcttgaatatggtgagcgccttcagaaagctttgatgtatcccactccagcagctgtgatgtaaatagtccgtcaggcagattgaactgaaattgccagcttttattcgagcgctgattatcgccaataaagagttccttctcaggagacaccctctgatctctgatcaccgttccatccgataacaccaatcgggcgtttttgactaagaagtcatcacggttttcagccgtatcaaacggagacaccttcgaacctgaacgtatcgtaatacgctgcagctgcttccctttccgaagcagtgtctctggcaatggaacagaataggtgcggtatttatttgttgtatcatcgaacaccttcagcactttgccttccatcgttaccgcgtttttaaaataaaggttcgttttcctcgtatcgaatgcaaaatatacttctttttccatcgcgggctctgtcacttgttttttcccgtcaatccacagcttaatgctgtcagctcgcccttctgtcgtggctttgagaaattgagttcccgacagcgtgtctctgttttcaatattcatccgcagaccgtgcgccttgcttgtttgtttaatatcaatcattttgaccggcgttctcgcttcattgatcccgtccccggccgccacataatactctagctgatccttcccgatcaattcaggcgaatacacaatataatggaagagattatcgttgcggtctttttcagcaagaattcgcttaaacggtttgttctcatccgtccggtagtaaaaggccgctgttttcactaggcttcggtcccgtatgtcagcccgcagctcaatgctttcagcagggcggacaggcttgcggtcagtccaatcctcaatgaccggcttttctttatcgagcttgattttccgtttctgctcgggcacctgtgcctgtaatacggttccgggagacggattcttttctccgattgaaatgttcagaagttctgcggttccgttcaacggatacttataaagcactgatgacagccggcgcagcgcatgtttccgataatgcgcaaccgaaatgtcctttcctgtattcgttgatatcacaacggcccgcggcctcgtattggccataccctctgtctcgtctatcaccgcgagattttttccttccgttaattgtgtctggtaatatcgattgaaatcctccgccgtcaattctggatgcccggcaggcttcagccagacgacaaacgtttcgccggatggtatcaagatcctttcatcaggtctccaaatcagatcggagtcaggcccttcttttgggtagcggtaacggatatggtagtctttaaaatcaatcgttctgtcagtcgtattaaaaatctcaataaattcataaccgtctgcgcgtcctatattcttcgtatcaaccgccagctctgtgatcagaagctccggaatatgggcaaggtcagcctggtatccttcaagcttcagtttcttcgtctccgactcaacccgctgcttcccattcgacatcacaatgtaatactcaagctcgctgttccaaatcaaacgtttcggaatttgtgccaaaaacttgcggaccgctccgggggtcgggtccatcggcaccattttgtagcccagctcattactttgtttataaaaaagaaaggcggaaaatgcttgatacgaattatcgcgaacttgagcctcaatcattagattgcttctcatttcagctttcacatcaatttgaggaggattttcaagcaagggtatgtaatgaggcgtctgaaatggttcctgctgaacaacaggaaaagctttcgattcatgatggccgccagacaaaacggaaagaaaagacaataatatagaagcaataaccgtgtatttcctcatcaaagcacctcccttttcatgtattttgcgtctgaacagggaagcttatgagttcatttttgtgcataaagaacaaaaaaacgtctgtctcttgaaaattccactattacctagtaaactaaggatagttaaccagttaacaattaaatcagagaggcaaattgatggacaacagcattcatgatgaattatttcaagctatacaacaattcgcattaaaaagggataaacgcgtctggcaaaaggtgcagataccatccattggcatatcctcacaacatcacgatcacctcaaaaaagactggactttgacccagcttcacattgtttcctgcatacataccagccaaaatgtgaacaacagcttcttagcatcccgtttacacatctcaaaagccgctgtttcaaaagcggttcatgctttgttgaaacacaatatcattacagtgacaaaaaagcctggcaacaaaaaagaaattttttatacgctaactgatagcggcaaagaactggcggggttacatgaacggcttcatcaaaaagcaaaggagcaatacaaacagctcttcaatgaattttcaattgatgagttgaaaacagtgactgcgtttattaacttgtggatcaagcatatgtaaaaaagcctcacccgcacgggagagacctttccatattattaagccctgtcaaatacaatatgaagtgagacgggtccgcgtgtatacagaccggactcagcataacaaaaatcttcctctaatctgatattccgcatcttatccagcacaatattagctacaatttcgatttcggttttggcaaaagctgctcctacacagttatgaatgccggatccgaaagcgagatgccgggcggcgccgctaaaagcgctcttgatgccaagatcttcccgatgaatattaaacacgtcaggctgttcaaatgcttcagggtcccggttagccgcaccgatcatacaaaaaacaatcgtatcttttttgatttccataccgccgaccactgtatcttgggacagctgccgcggaatcagctgaaccggcggtttataacgcaatgtctccgcaatggctctcggaactaacgaacggtcagccaaaacatcattcatctgctcaggattgttgagcaaatggtagatcatcagtgccagcgtcttatcagccggttccgttgcggctaacagcacattaagaatcagtgcgagtatatccttgtccgacatcgccatgccttcatattcagaagtacataggatggaaattaaatctgatcccggattgacgcgacgttcttcaatgaccggcatcaagtattgggaaagctgttcgctgcaccataacgaatgtgcccgcgcttcaggagattgagagatactcgtgataaaatcggcaactccgctatgccactcagagattttttcatggtctcttttatccagcccgagcatgtccatcgtgacgcacaccgcaaacgtctttccaaaatcattgacgagatcaattttccctctttcaagataaggcgctaacaagttttctgcattttgtttaatcaatggagacagatgatccagtgcgtcaccgatgaagcttctcactacaattcttcttttggcagagtgttcttttccatgcatttgggccagcacagggcctcgcattactggttcggcacgctcaacaagtgatttcgtcgtgaaaatatccggatgctgaaggatatagcggacatcatgatagcggctgataaaataactgtctatcgactcttcataatgaaccggatcttcctcccgcagttgtgaaaaataagcatatggattgttttgaaattgatcagaaagcacactaaacaatttaatcgattggctcatgttttactccccctatcatccttcacatgtgatccgtttctcagaaagcatctgcgccatttcctgtacaatgagatacccgtgattcgaccgcatacaaatagaaaattcatggttactgatcttctcaccgagcttccacggacgatgataagcaaggagcgtctcttccacctctaaaatatccggagctccgataaaaaacggcagctcagctatgacatattccacagccaaattcagcatatcctcactgacttcttccatcatcaaactgacgccccgtgcacgcccgattatcgcttcacgagacatgtccaaacaagcatgtcgaaaatgaggctgctcaaaaaaagcatgttcaacttcttgtctcaacagctggtaggctttgttatccataaaatcagaaaatgtatgaatcgccttcggatccccgccatgagccacaagggctctttctgcaaatctcctgtttcgtgatacctctttccttacttttcgttcagcctttcctctcggagttccaagcgcttctagaagattagccgcctcatgccctgcaagtaaaactgaaacgcttttaaattgagctttcgcccatccaattaatctgtaaatataatcctctgaaaacctgctgttaaatgggctgatccccaccaaaacatgcctgcgccgttcaaatatttctctgcagttttctgttaatgcctcagcaataaaatgcacagaccttctttccgttaccattccggtcatctcattcacccctaaaacttatcccgctttaagtcatcaccctcaaatacaagatggaatagctagaacaactgaacaagacgaatggcaggcagcacttaaagtttccaaatgttttttaaaattttaattactatttccatttcacatatcatgataaatgtttactagtaaacattagtcattttatcccttttccttccaaacgtcaatatgatctgtgcccaaatatttgaaaataaatgtaaacatcacattttccacacactttttacacgcatattcagcatgacagatcaacaaatagtctaaacaccaacaattgacaacgaaaacaagaaaagataaaatgaaattgttcaccagtaaacaatttgttttattgtttcatcgtaaactattattactaagaaagaaggtagcctatgtctgatttgacaaaacagatgatatacgacatatacgtgagactgctgcaccttaatgaacaaaaagcgaatacttcacttcagcaattttttaaggaagccgcagaagaggatgtgattgatatccctaaaaacatgacaagcatacatgtcattgactgtatcggccaacatgaacccattaataatgccggaattgccagaaaaatgaacttatcgaaagcgaatgtaacgaaaatcagcacaaaactgatcaaggaagaattcattaacagctatcagctgacagataacaaaaaagaagtttattttaaattaacccgtaaaggcagacggattttcgacttacatgagaaactgcataaaaaaaaggagctggctttttaccaattcctcgattcattttcacaagaagaacaaaaggctgtattgaagtttctagagcagttgacgtcaacacttgaagcagaacaaaccgatgggactccggacaaacctgtaaagtaaacaaaaaggcggtgtacactttggctcatacaaaatcaaaggcagtattgatcttatacactgtttgcttcagtgcattttttgcatctttaagccagaacatttattcacctattcttccgatcattaaagaatcattccatgtttccacagctatggtgaacctgtcagtctcagtttttatgattgtgacagcaataatgcaaattatattaggagcgatcattgattttaaaggcgctcggatcgtcttgattaccggtattctggcaacggcagcagccagcatcggctgtgcggtgactactgactttactttgtttctgatattcagaatgatacaggcagccggttccgcagcactgcctcttattgctgccacaacgatcggacagctgtttacaggcaatgaacgcgggagtgcaatgggaacgtatcaaatgctcctgtctgtcgcaccggctattgccccagttctaggaggattcataggcggagcagccggatacgaagggattttttggatacttgcggccatctctatcgttttgctggtgacaaacagcatcacctttcctaaagattctccaactgaatctatgcagcaagccaaaggcaatgtgttcgctcattataaatcaatatttacaaatcgaacagggaacgtcattttgactttaagttttgttctctttttcatttattttgcagtaattgtctacctcccaatattgctgacagagcattaccatatagatgtgggtatagcaggactgttatatttgccgctggcgctgagcacgattgcaggtacgtttctgtttaaaagaatacaggcaaaaatcgggctgcacaccttgtttatcggaagcaatgtgattgccgcctgcagcatcattttatttgctgttacacattccgtttctctcgttctcatggctctgacgctggcactgtttggcatctcgatgggggttattcctcccttgtactctacaatgattactaatgaatttgagcacaacagagggagtgcaatcggaatgtttaactttatccgatatacaggcatggcagcaggtccgatggtatctgcctacttgctcacaatgatgccgtctgccatgtcctttagcctcctaggccttggatttgccgcattgagcttttgccttcttccgccaatgttttcgccgcagaagcgcacgaaacaaaaaaagcaccacatgtaaaaaagctgcctttgcgggcagctttttttatttttttctaagcggctctaaaatgcctttttgaatcagcaaatggaagaccgacaggataacggatgcccatatcgctgtgccgaagccgtcgatttgaaagctgtcacccataatggacgcggtcatcataagcgtgatggcgttaatcacaaacaagaagagtccaagcgtcaccatggtgaccggcagtgtaaatataattaaaagcggtttaatcagcacgtttaagatcgataaaatgaggctggcgataatcgctgccccaatgctgctgatatggatggagtcaatatatccatcaatgacgattaataacaatgcattgactaaaatgctgactgcccattttaccatgtcatttcatatccctttctgacgggacgataaaaatccaaatgatataaatgagcaaaaccggcaagacacttgtcataatggctaagatgacagttatgactctgaggagtgatgcgtcccaattgaaatattccgcgagacctccgataacaccggcgattttcttatttttttctgagcgataaagcttattcattcgatcacctctgtgagtactttagtttgatggcgcctgttagtgattctgagaagacggtgatgttttgatcatgtgcctgatttgaagtgaacatcatttctttttgaatcgtatcatttttttccttcagcatctctacatccattaattcatgggacagcgtaccaagattgcttttcagctctgccttcactgcgagatcgtccggaattgcaagctctacatttccagtcgttgtttttgcataaatggagcggcagtctgattctgttacgttaatcgcaatatttccgttaaagctttgaacgtcaatggattcgcttttccctcggagatcgatcaatccgttaatggtttccgcttctatcgtaccgcagctgtggcttgcgagcttaatttgcccgttggccgtttcagctatggctttttcggctgttaaatacgagaacgacagcacgccgtttgtcgttttcgctgagaactcttttacatgtaaatgttcccctctgaccggaccgttaaacagcttcacccgaatcttatcatactccttctgaggaatatacaaagtgacattcgttttcatcgtctttttctcagtacggataaaaaacttattacctttgatttcacattcaatatgctgaagaaatgcgtgtctcgccgcatcctggttgtcagcgcgatataccttcgcctggcattccgctctgatatcgtcatcttcccaagggacgatatttacgctgccattggcaatttgcagctcaacactggaaaagtcagtatctttaaattgaaaaatgtgctgaacatcatacgcatggccaaagtttaaatcaaggtcaacttccttgacctttttcacagcagaatcaatccagtcaaacagcttggctcctaaagacggtttaccgctttctttttttgccgttgtaaatggctcttcctcgtcatgaacgtgaactgagagcgctgtgattttctcttctttttccttgtagtcgctgtcaagcttttcaatcagtgtcaaagcttcttgtgctgtaagctttccttcctcaacaagcttaaggattcgttccttttcttgcttcattacgatctcctccccattgtctacttatgctgcacgcaggaccttaatgccctgaatcacattccaaatgataatgccaatgacaactaagaaataaataaccgctcccccgatgattacaaatacaggaagcaagctgtctccatcaatcgcaacggctccgccaagtaaagcaataaaaaggaacagccagccgacaaacggaacaatgtgagaaataagagagcgtatcgcatggcgttttgtttctttctcatttacaacaaaatatgcgacaatcggcacaatgattggcgcaatgaacacactgaaataacaaagtgatgcaataatagcttgattacggttcaattcattccacactcctattgtgaattgtccatgacaaaagatcagggacgttttacttatttatacgtttaaaatctcttcaggtttcaaattcattctttagacatgctccgatttacggaaattggattttaaaaagttttagaagtagaatcttccggctataccgattacaatatgtaaaaagcttacggcaaccaaggaggctggacaagcaatggagaaagatcccagtgactatacagtaacacaagaatcagtgttaaagctgattcaggaacaaaaaagaatgaatcgtgaaatgatcaccgagcttgagcagattcacggacccttcccgatctctcacgatatccaatatataaaagtgctgctcgacagcagcaacacacatattgttcaagatttaatgagtgtaagtaagcagctgtataagaagactttgtaattgcggaaaacatatcattcattataactgaaacaaagctaaaggttagatgacaatatcttgccttttttgttttgaaaaaacaagtgattccctggctgtcacaaaatgattgtaacaaaaaaaagcctgccggcacatccagttaatggactctgtcggcaagctgtaactatcagaaagagatagccgttcaaaattaacgtaacaattgaagcacgttttgcggctgttggtttgcttgagcaagcatcgcttgagaagcttgagaaagaatgttgttctttgtgaaatcgctcatttctttcgccatgtcaacgtcacggatgcgagactcagcagctgttaagttttcagaagaagcaccaaggttgttgattgtgtgctctagacggttttgtaccgcaccaagtttagcacgttggtttgaaacacttgtaattgcactatcgattttaacaatctcagtgtcaaaactaaaatcatctgctgaaacatcgataccttttactcctaaagttgttgcatccatgttaccaattgtaacattaatattttggccagcatttgcaccaatttggaatgtaaatcctgctgtttcactaccgtctaaaagtttttttccgttaaattcagtacgttgagaaattccatcgatctcttcagttaaagcatccatttcatctttaattgcagttaaatcttcagtttgctgtgtacctgtgtttcctgcttgaacagtaagttcacgcatacgttgaaggattgcatgggtttcagtcaatgcaccctcagctgtttggataagagaaattccgtcttgagagtttttagaagccatttcaagacctctgatttgtcctctcattttttcagagatcgctagacccgcagcgtcatctcccgcacggttgatgcgaagacctgaagaaagtttctccatgttttttgagctcgcactgttgtttgaagacaaacggtttagtgtgttaagcgctgcaatattgtggttgattctcatgtgaaaaatacctccatgtgtatatgtttttgaaatcaaagacttccttttctttgatttctggcgtatcagattccaataaagcttctaacctatgtagattcagttattgcttaaggatgcctttaagccccttaatagggtttgtctgcttaatttggaaatcatcatccgcctttcaattcatatatcgacagccatttgtaaatgtttaggcgttttcccaaagaaattataccaaagacgaatctaaacctattatgccgtaaagaaaaagcttgcctgctaagcccaaggatggacttgctgacaagctgtcccctcttaacagaggtttttttaagatgtagctgtttcttttgctttcaagagcgatttcatgcgtgttttgtcacgttcgataacaggcttcaaataacggcctgtatacgattcttccacttcagtgatttcctcaggcgttcctgacgcgacaatggttccgcccccggctccgccttccggtcccaaatccacaatgtaatcggccgtcttaatgatatcaaggttgtgctcaataaccagtacagtgtctccgttgtctaccaaccgttgcagcacgacaagaagcctggcgatatcgtcgacatgcaaacctgtcgtcggctcatctaaaatgtagagcgtgcgtccggttgagcgtttgtgcagctctgacgcgagcttcacgcgctgcgcttctccgcctgacaaggtcgtcgccggctggccgagcgtaatataacctaaaccaacatcataaagggtttggagcttgcgtttgattttcgggatattttcaaagaaagaaagagcatcttcaaccgtcatatcaagcacatcagagatgctttttcctttgtacgtcacttcaagcgtttcacggttatagcgtttgccgtgacacacctcgcatggaacgtatacgtcaggaaggaagtgcatttcaattttaataatcccgtctccgcggcaggcttcacatcgtccgcccttcacgttgaagctgaaacggccttttttatagccgcggaccttcgcttcatttgtctgcgcgaatacatcacgaatgtcatcaaatacaccggtgtatgtcgcagggttggatctcggcgttcttccgattggcgcctggtcaatgtcaatgactttatctaaatgatccaaacctttaatctctttatggctgccgggcttcgctttcgctttatgaagcttttgcgccagcgccttatgcaaaatttcattaacgagtgtactctttcctgaaccggaaacacctgtaactgctgtaaacgtcccaagcgggaacttggcattcacttttttcaggttgttttctgaagcacctttaatttcaatgtaacgtccgtccggctttcttctttcaggaggtaatgggataaactttttccctgataaatagctgcccgttaatgagtttggatcttccatcacttcttccggtgtacccgcagatatcacctgtccgccgtgaatgccggctcccggtccaatatctattaaataatctgctgccatcatcgtgtcctcatcatgttcgacaacaatcagcgtgttcccgagttctctcatatttttcagagcgctgatcaagcggtcgttatcacgctgatgcagaccgatagacggctcatctaaaatataaagcacaccggataagcgcgagccaatttgagtcgccagcctgatgcgctgcgcctctcccccggacaatgtacccgctgccctgctcaatgtcaggtaatcgaggccgactttgtccagaaagcttaagcgctccacaatttcgcgcaaaatcaaattggcgatctgcatatccttctcagaaagggtaaggtctttaaagaaggcaagtgcgtcggcgacagacagctcggtaatttttccaatgtggcggccgtcaatcagtacggcaagcgcctctttctttaaccgatagcctttgcacgtcggacaagatttctgagacatatactgctccatttgctcacggatgaaatcagagcctgtctccttatagcgtctttcaatgttgcgcaatacgccttcaaattgaatttcaccttcgcgtatttgtccaaaatcattttcatatcggaaataaatcaggtcatccccgctgccgtacagcactttatccagttgatgcttcggcaaatctttgaccggcacatccatatcaatcccgtagtgggtgcagactgcctcaagcagctgaggataatattgtgagctgatcggtgtccaaggggcgaccgcattctccttcaatgacaaatcttgattggggatgacaagatcggcatccacttcaagcttcattccgagaccgtcacacgtcggacacgccccgaacggactgttaaacgaaaacagacgcggctcaagttcaccaattgaaaatccgcagtgcggacaggcataatgctcgctgaacatcagctcttcctcaccgatgacatcgatcataacccgtccttcacctaaacgaagcgccgtttccaatgaatctgacagccgggctgccacgccttctttcacgacaatccggtcaatgactacctcaatggaatgcttcttgttcttttctaattcgatatcgtcggaaagctcagccatctcgccgtcaattctgactctgacatagccttgtttcctaatctgttcaagcactttgacatgagcgccttttcggcccgagacaatcggcgccagcacctgaagcttcgttcgttccgggtattccagaattctgtccaccatttgctcgatggtctgggatgtaatctcaattccgtgttccggacaatgaggcttccctactctcgcatataaaagacgcagataatcataaatctcagttaccgtaccgacagtagacctcggattgcggctcgttgttttctgatcaatgctgatggcgggagagagccctcaattgcatccacatcaggcttatccatttgccctaaaaactggcgggcataagcagacagcgactcgacataccgtctctgtccttcagcatatatcgtgtcaaaggcaagggaggatttacctgatccggacaaacccgtgacaacgacaagctgatctctcggaatcgttacatctatatttttcaggttatgcgccctggctcccttcacctctatccgatccatagccatttgttcatcatccttccgcttttagctctaaaagtaaatcgcgaagctccgcggctctctcaaagtcaagcgccttggcggcttccttcatttcatgctccatctgttcaacgactttctggcgttctttcttcgtcattttcgacagcttcggcgcggcttttgttttgtattccgctttatcctcagctgctactgtggcacgaatgacatcgcgaatttctttatttatcgttttcggcgtaatgccgtgctcttcgttaaaccgctcctgctgctcgcggcggcgttttgtttcattaatcgcaatttccatagacttcgttattttatcggcgtacataatgacgcggccttccgcatttctcgctgcccgtccgatggtctggatcagcgaccgctctgaacgaaggaaaccttccttatccgcatccaaaatcgcaacaagggatacttcgggaatgtccaaaccttccctcagcaggttgatgccgacaagcacatcgtacttgccaaggcgcaggtcgcggataatttcaatccgttcaagcgtcttgatctcagaatgcagatagtttactttaatgccgatttcttttaaataatcggtcagatcctctgacatcttcttcgtcaaagttgtcacaagcacccgttcattccgctcgattctagcttgaatttcgccgatcaagtcgtcaatctgaccttcgattggacggacgtcaataagcgggtcaagaagccccgtcggacgaatgatctgttcgaccatttcatctgtatgttcaatctcgtacggccctggtgttgctgatacatacacgatattgtgcatatgcttttcaaattcctcaaaacgaagcggacggttatcaagcgctgatggaagccggaagccgtgatccacgagcacctgtttccgcgcctggtctccgttaaacatgccgcgcacctgaggaattgtcacatgcgactcatccaccacgatcataaaatcgtctgggaaataatcaagaagcgtatacggcgttgaacctggaggccgcagcgtcaaatgtcttgaatagttctcgatgccggagcagaaacccatttcacgcatcatttcaagatcatatcttgtccgctgctctaaacgctgcgcttcaaggagctttccgttttcatgcatgaccttcagctgctcctcaagctccttctcgatattttgaatcgccttctccattttctcggcccgcgttacgaagtgggatgccgggaaaatcgcaacatgatctcggtcgccgagaatttctcctgtcagcgcatccacttcccgaatccgttcgatttcgtcaccgaaaaattcaactctgatacaatgctcatcacgggatgccggaaagatttccactacatccccgcgcacacgaaatgtaccgcgctgaaagtcgatatcgttgcgggcatattggatgtctacaagttttctgagcagctcgttgcgctcaatttccatttcagtccgcagtgacacgaccatttcccggtattcctcaggcgaaccgaggccgtatatacaagacacactcgcaataataatgacatctctgcgctcaaacaaagctgatgtggcggagtgtctcagtttatcaatttcatcattaatactagcgtctttctctataaatgtatccgtttgaggcacatacgcctccggctgataataatcatagtagctgacaaaatactcgacagcattgttcggaaaaaattccttgaactcactgtaaagctgtccagcaagggttttgttatgggcaatcacgagagtcggcttattgacttctttaatcaaattagacaccgtaaatgttttcccagttcctgtcgcacccagcagagtctgatgcttcttgccctcctgaattccttttacaagcttttcaatggctttcggctgatctccttggggctgatatttcgagactaactcaaagcgatctttcacaaaaataagcctccgtttctttaacgaaatcttcctatagatatagtaacacaatggaaagcaaaatcactaaaaatacgaactaaagttcggtggttttttatttccagctgtttttgtgtataaaaaacctgcttttaaaacgtaaaagcaggtattcagtctttatattcattatgtccgatttattcttcttttttctctgcagcttttttggccatatacagtccgccagccacaagagacacaacatccaatcctacaataaaatacgtttctgtatagccttttaaataagaggcaaacagcaatgcagctgttaaagcgatcgccacataatgattaaaggtgactctagtaaatagaacaacaagcataaaagggaaaaacaatgcaaaaacggcttttgtaatcaacaaaaaccctcctcagggattcttcatctgatctgattatagtaaaaaatgaagaatcggacaatcgtgcattcgctccctctactacaccataccccttttcagccaaaatcaatcactatatttgcattttggtgccggtcaaaacttattccatggtgccgctgttctaatcagcggcactttttttattacatcatcaagtccgccgccagattccgagaataaaagaaaataggcatacagtaccagtacggccgcatttttcaggataatataaccaacttaactattcattttatttaggactttctgcgtttgacagcattttcctgaaaacctacaattaaatgatagtgtttactatcattttttaaacacaggctccgcaataaaaagactagagagaaaaacaaaatgaatgaagaaaagaggggtttcaaatatgtattctgttttatttcgccaggcagaagagtccagccagctggctggagcaaaaggaatgaatttgattaaattgaccaaacacggtcttcctgttccggacgggtttattattcaaacgaatgcgatcgcacgttttatggaggacaaccagcttcaagagactagtgaaaacgtcgaaggcgggatcatttccggaacattttcggatgagctgaaagatgagctgactagttccttttataagcttagagaatcatatcgatccgtagccgtgcgttcttcgtctgcctcggaagatttagaaggcgcctcattcgcgggtcaatatgaaacctacttaaatatcaaaacagaggaagaatttctggctaaagtgaaagaatgctgggcttcatttttttctgggcgggtcagcagctataagaaaaaaatgaacaatcaaatcgcagagccgttaatgggtatagtcgttcaggggctgatcgattcagaaatgtcaggtgttatcttcagccgcaatcctgttacccatgatgatagagagcttttaatcagcgccagctacgggttgggtgaagctgttgtttcaggaagtgttaccccagacacgttcattgttaaaaaatcttcgtttgagattcaaaaagaaataggtgcaaaggaaatctacatggagtctgcggcagaaggaattgctgaaaaagaaacgagtgaagacatgcgcagccgtttttgccttacagatgaacaagtgattgaattggctgaaatcacaaaaaaaaccgaagacctgtacggatatcctgtcgatatagaatttggaattgctgatcatcaaatataccttctgcaagctcgtccgattacaaccattgatcaggacaaaaaggcggcagaagaaaaacgcagcttcatgattaccgacactgatatgaatgatttctggcttaacatggagtctaatattgaaggtccggtgagtccgttattttcatccttcatcgtgcctgcgttggaatatggcttgaagaagagcatgcaaaagtttccgattggtgtagttgttgatgaagtaaaactttatcgcggacatatttattccaaaaaccaaggagggcagcagcctccttctgaagactgcggcaaagagcttttcccgattttatcggagcatatgtatgacatcattaatcacacatacctccctttttaccggacactggaccagctcgcacaaactgagcataccgcagaaagcgcactggatgcttttcaaaaactaaaggccttttatctcacggcttatgaagagcacttcaatatcgttttcccgcaaatccttttaacaaacaaactgcaagcgatgtatcaggacattcaaggagagtccgaaaacgctcatttttacgagatgctgacaggaaaaatgaacaaatcactggaaacggaccgttgcttatggctattttctgtggaagttcaggagaacccgaaccttctggccatttttgaaaacaacaagcctgaacaactccaggagaaattggaacaaacagatgagggaagacacttcctgaagaacgtccatgaattcttgcaagaatacggatggagatctgttaaaagtcatgatctgattgaacaaatctgggtggaaaatccgtatttcgctctggccaatattcaaaattatgtccgtaatggctatcattttgacaatgaatttcagaaaacgaaagaaaaacgagagaaattatacaatgaattcttggaaaacatagaagatcccggtttacgcaccgaatttgaccgctattatcaatggacactgaactctgcaaatataaaagatgatcaccacttttatattgacgccatgctggatgccaaggcgagaatctttctgctgaagataggtgaattgctggcggaaaacggtgtcattcaagatcgtgaggacctttggttcttatatgatgacgaagtggaacaagcgcttcttcaccctgtatccctgcaagaaaaggctgaaaaacgcagacagatttttcatgagtatgagctggcccaagccccggcctacctcggcaccccgacaaaagaacagctcaaagcagctgaagaaattgtcggcgctgtgatagaggatgaaaaaaacacagagaatcatatttttggcattgcggcatcaagcggcattgcgacaggtccggtgaaaatcattcgggacgccaatgaattttctcaattcgcgcctggggacgtactcgtttgcaagatgaccacaccgctatggaccagcctgtttcaagacgccaaagcgataattacagacacaggcggcattttgtctcacgctgcgattattgcccgtgaatacggcattccagccgttctcggcacacgcacggcaaccgaaagactgcgagacggtgacatcatcactgttgacggtagcagcggcaaaatcacagttgtcagccggtcctgatgcgtccccctctttcttatacaagcggggcgggtgtatacttgtcctgccagtatactcgtgaggtgaaacgtattgagaccgacaaacaagagaatccttgatgctgccatgcagctgctcgtcaaaaaaggatatcgcgcaacaactacaaaagaaattgcagaaaaagcaaatgtaagtgaagcgacgattttcaggaactttaaaaacaaacaaggactagttgaggctttgctttctcagcattcttcaaacagaggcagcattttggaacaaacagaaggggatttgtacaaagacctgcttcatatcggaacctgtctcttggaggagctcgaacatagaaaagatatcattaaaatcagctttcgtgaaccggccatgtttcaggatgtcattaaccacgtcactgaatatccccaatctatgaaacagctattggttgattatctcaaaacaatgggtgagaaaggggttattcagacaggaaatgaagcggagcatgccgacgtgttcatgtcgattatcttcggttatttcattcaccgtctccacttaggagaccgggtcatatcaatgccccaggaaaaaatgctggagcacagcacagctctatttgtcaaaggaatttctgctgattaactccttggcataataaaaaggaggatcccaatgagctcaagaaaagaatgggcgctgatcgtctcgctattattgggggccattctggttcccattaactcaacgatgatcgcggtcgcgctctcatctatttcccatacgtataacgagtccatcgcaagcatcacttgggtggttaccgtttatttaatcgtgatggcagtcacacagccgattgcaggaaagctcggtgacatgtacggcaataaaacaatgtacttatggggagtcggcctttttctaatcgcatctctaggctgcgccctttcaccgagtctgctcctgttaattgtctttcgggcattgcaggctgtcggcggggcattgcttacgccaaacagcattgccattatccggcatgttgtttctgaaaaacgcctaccgaaagtgtttggatttttcggactgggtgcgggacttggtgcagcactcgggccttttatcggctctatactgattgacagcttcagctggcattcgattttttgggtcaacatcccgttcctcgccattgctttatttacggcattaacgatgtttcctcaatataaagaaaataaatctgacgcgccgctggatatcatcggctctctcttgcttgcaggcagcatcgtttccattatcctgctgacgaaaaatgaggctccatggggatatgcggtatacagtgtattgatacttctttttgttccgctttttttcagaagagaaatacgtacccagcaccccatcattgactttgcactgtttaaaagctcaacctttacaaatgcgaatctatcagtcttgttaagcaatttgatgatgtatgccgtcttattgattatgccgttatttatgacgaaccaatttgggcttaatacgtctaacagcgggatggcgctttctgtattttcgatcttcatgtcagccagcaactgggtgggcgcgcagctccatcacaaatggggagccaaaaaaatcatttttctttcatttgccatgatggctggtgcgaatctattatttttgctgttaagcagctcgcattctgtcttattcctcatgctctctcttatccttggcgggctcgcttccggagtcggtctgaccagcatgcaggtgtcatcccttgccacagtagaccccggaatgtcaggagtggcatccgggattttctcgaccttccgttatttcggaagcatcatttcatcagccttaattggcctgatttcgggatatcacatcctatttatgattctctttgctgtatccatcatcggcgtttttgtttcattgggcatcaaatctgatgaaacggcacggatagaaaaaaactcagcgtaacgcaaaacagcccggcatcgcatcttcctgcggtgccgggctgccttttatgatccagaagcggctgcttcgtcttcacggtcatcctttacgaagaggatgcccaattcatgatgttctccttcataagaagctcgctggtcaaaacggatttctccattcaaaccgataatttcaagctttacatatgcacggttatgctgaagcgcttcatagaaatcagaaacgttcttaaccggtatgccattgactttcgttatgatttccccgattttcaattccagatcctcagccggcgtattggggataatcccaagcaccattaagccctgatcccttttcgagaaataaaacggagccgcgttatcattcactctttgctttatggacaaaaaaatgcgccctaacaaagcagtacagaccgctgcacccgcaagcggcgtccacagtaagctcgctgcaccgagaactgcgacggcaagaccgagaatacaaacgcgtttcgctgtgatccttatactcgtttcaggcagcgatccctgtaccctttgtccaaatccgacaaagtaaggaatccatagaaaatgaaatgagccgccgggaacagtaaacacgggccaccagctaaggtgcgattctaaaccattgccgggcacgagaaggaacagcggcaaaagccaaacccggtttgccagctgctgtccgatcggcaaaccgcggctgcttacgacaagtgccggtgatgttctcacatgcgcagaacgataagcaaccgctccttcagtgataatcagcaaacctagaaacacagccacagccggccaaacaactgcaaatccttgctgaaatctctccagaaagggctccgcctgatatatttgcagtccaaaacctatcagcatactcacactgacgatatatgcagcagacatccagtttgcgcgaagagtgaacgctgccgctgcagtgataacggcaataatcgcaagtaaaccgagaggaatcgatattccgagtccacctaaaataactgacaaaagaagacctggaatcagtccctttgtatatgtaaatttcagatcatcataaatatctgctattcttgtatgaaaggtttttcgttcccgtttgattcttacatagccgaaagccagggttatgatgataaaaaaccagaaaagcgggtgtaagaagaacaagcccgcgctttttaacagttcaattccccattgaacagacactatctctcaccgcctcaagccaaacatgttactcatattctatcaaatattaaatggcttggatatcctcaggagagtttatctctcttgcgtcatccacagcgtgacattcgatagtgaaaaatcctttaaatagtggtttacatccacatccaataacccgctgattagatgcatcgacctttttatatctgtcagattaattcctaatcgcttatggtttttcattaagtagttaaaataatgtttggcgcattcctcattaatgtcatttactgattcgacattggtgtaattgaccaaatatctgctgaacagcataagaagacttagtgcttttgtagctgaaaatgttacgtcttgtgttctgtcttttaattgttccactaattcataatattttttttcacgcacaatacttgccctcttcaattgtgaacccccattttctttatacagataagcacgggccagtataagcagcagtactggagtgctaacaagcattctcgctaacgttactctttaaatacctgtcgttcagctgccattaacctgattactgttctttttagaaccttcttatattgtatgaagtaaacaaagactaggcaacttgcaaaagtttcattttaaatgcatattaactcgttagaaagtctctctcatatattgatatcgggtaataacagtcctttataaatgtttatttgtgaaaatttttttaatttcttgtcaaaaactcattttttatgtgacttatgatccataatctctttaagtacaaagaaacaggagatggaataccatctcctttaattgacaaataatgatttcaatgctgtttgaagctgcaaatcatttttgtcatctgattttttcttttctatctgctgatttaatgtctctgcagtgcgagtgtcgatcacaccggttttattcagcttgttttgatcctgaaaagccataaccgcttttttcatgtctttgctgaaatagccatcctcacgtcccggatcaaagctgagaccttttaacaatacctgcgcatgcttgacgtcttcattgttcatgtccactttaagcggctctttcagctgtaaaggcccagcggaaaaataatcgggctgcttaatcgcaatggtcggttcaattcctttcttatgaatccaatttccatttggcgtcagccacttgtaaagcgttaatttgatgttgctgccgtcccccattggcacagcctgttgaaccgttccctttccaaaagacgtatcgcctacaacatcataatggccagcttcctttaatgcgccggcaagaatttctgatgcagaggcacttcctttatccgtaatcacattgacagggtacgcttttttatgggtcaatgttgaaaaataacgttttttatccccattgcgttcagcaatctgaatatacggctgatcctttgtaacgaaatgcttaagaatttcttccacactttgaagatatccgcccgggttgccgcgtacatcaatgacaagtccttttatttcttttttctcaagctccctcagcgcttttgcaaaatcctctgcggtgtgctcagaaaaagtagagatggcaatatatccgacagaatgcccctgtacttttttctctgatgcaaaaaccgtttcgagcggaatctcagctctcttgatccggaatgacagctgcttcttcgttccaggccgctgaatcttcattgaaacgctggaccctttttttcctcttatttttaacacagcgtggtttaaatccttgccggccatcgattctccattgatgctgataatttcatcattaggcttcaacccggctttttccgctggcgatttcttgaatggagaaacaataataattttgccgtcttccattccaacctcagccccgatgccttcaaatgaggaatcaagagaatcagaaaattgcttagctgtctgcttgtccatgtaaacagaataaggatcatttagcgtagacagcattccctggatggctccctcgagcagcttttctctatctactttttctacgtactcattcgatattaactcatacgctttttcgattttgtccatagctttatcccgttcagagtcagcttgtgccgtcgcgggaactgctgcagtctggggcttatccatctcaagcaggttgattcccgcatatacaccgacgcctccgaacagcatgctccctgctgctatcacagccattattttttgattcatcctttactcctcctgtatgccagactgtctttaccaaaacctagagatagtatatgtaaaggatggagatttcatgtaatcatagaagaaaaagaaggcaaatgaaaagccgtcccgaaaacggaacggctttttcactttatactcgcaaaaacttgcggatggaagtcagacttccccatactccaattactgcgccgattgcaatcagcactagcgaaacttggaatacaaatggattataaggaagaagagagacaaatgatccttgaacctttggaacgacccatccgatgacgtattggtaagtgctcagcaccagtgcaatcggaatcacagaaccgaatacgcctagcagcaatccttcaaggaaaaacggccagcggataaaccagtttgtcgcgccgacaagcttcatgatttcaatttcttttcttcttgcgaaaattgtaattttaatggtgttggaaattaagaacatcgccgtaaataccaggccgataattaacgcgattccgatgttgcgggaaacgccgaccactttaaacaaacggctgacctcttcttttccataagtgactttataaacatgatccattttttcgatctttttcgccacgttcggcgtatcatgcggatctgtcgttttgacgacaaacgcatcattaagcgggttttcctgatccttcattgtcagggattttccgctgtcaccaaaactgtcaaccagctggtcaagctctttttctttagatgaaaaagtgacactctgaatgcccttcagttccttaatatcgttctgaagcttgtcctgtgccttctgatctgcagtcagatcaaccagcactttgatttcgacttgtttttctgctttcgtggccatgttattcaaattcagcataatcactaaaaacacgccgactaaaatcagcgtaacggttacagcactaatggatgcaaatgtcatccatgtgtttctcccgagagatttaaaactctcacgcaagtggcgcccgagaattttaatcatatgaaccatactcccctcttgactcatcacgcacaatgataccatcttcgattgcaatgacacgtttcttcatggtgtttacgatttctttattatgtgtcgccatcacgactgttgtcccgcggttattaacttcctccagcgtcttcatgacttcccaggacgtatccggatcaaggtttcctgtcggttcatcagcaatgacaacatcagggttgttcacaattgatctggcaatagatacacgctgctgctccccgcctgaaagctggtcaggaaattgtcgcgctttatgcttcagctgcacgagatcaagcacttcaagcacccgtttcttaataacagacggctgttctccaatcacttcaagggcaaatgccacattttcaaaaacagtaagtttcggaagaagcttgaaatcctgaaagacaacgcctattttgcggcgcacgaaaggaatctctttttctttaattgtcgcgagatctttatgattgattaaaatttgtccttttgtcggtttttcttctctgtaaatcattttaataaaagtagatttacccgctccgctcggcccaacaacatacacaaactcaccgggatgaatggtaacagaaatcccattgagcgcttttacgccgttcggataggctttatatacttccttcatctctatcatgaaatcacctaatcttttatatcattttatctatcacacggtcatactcttcgaatgcattcgacaatttatgatccattcatttgtaaaaagatgaaaaatctgaaagttccctttttcaatacacttcattatacgtcaaatttagacataatactattacagtttcttttcattcatatttaaagaataaatattcatttgggttggaagtttcgtttattacgaaaactgtttttccatttaaatgaatcaaatccactacttgacaatcattgataaataatataaaatttcgtcaaaattacttttttgtatattaatgttaatatatccataaaaatgaacttggtatcactctcaacttgttatctcatatttacataatctaagtagacacgaactaacagaaaaacatcattaatttatttaaggggtgttataattgaagctaatttacaaggacgaatacggtcctctatattctgaaaagtcaaagaattctatccttaaagagcctacttattttgaagttgattccaaagacaacttaaatagaattgttgataaaaaaggacattacacttatcaaaacaataagcttcataagataaaacctaaaaatataggtgcatctggcagtaatagtggataccctctcattatggataaaaaaggacactccttggaatatggtagagaccttcttgaagtatcaatgagaaataaactttatattaggaccacagaaaaagaatattgttatgagtacgataccgaagttgaaccagatactattcaaatttttgatgacaaagtgcttttgaatttaaaattaagacaaatggttgtacttgtatctacttcaggtaaagttttaaatagctttggtcttgatagatacagaggtgaaggacaaaaacaattaaatgttcccatgttctctgtatatatagaagatagaaattctatattaatttcagatgccattaattcaagagtaattgaagtcgacgaaaatggaaatataatttggaaatatggaaaggatggtttattaggttcggatcaaggactcttatggaaaccaacttgcgcaagaagactttccaatgggcatactattattgcagattccaaaaataaccgattagttactatagatcaagataaaaatattgtaaatgagattgggcaaacaaatgtttctaaattgtttctcacatatcctcgctctgttcaaatgcttgataaatataattggctggtgacaaatacacacaagaattctatctttatcatgaatcaaaatcaaaagaaaatcataaaacccataaatgattcttataacaagttaaatttattttggccaagatgtagtataaaaaactcggatgatgaaataatcatagcggacggaaagaataatagaataatgtttattgacgataaaacattacaaataaaaaaagtaattgattactattatgaacaaggtaatagaatgacaattattgatcctcatgatattaaaataaaccctaaaacaaaccttcttctcattaccttatctggaaacaatagggttatagaaatgactagtgatggcgagttaattgagagctatgataatctaaacgaccctcattctgcttattacttttcaaatgggattattattgctaatacggaagacaacaacatagttatttattatttttccggcaaaaaagaaatcattaataattttaaatctactaattcatgctgtgatgcctttaagagacctcgttatgcgctaccttataaaaatggatttctaatattagatacagacaatcaaagaattatatttttaaaaaaagagaataacgaatggattggagaaaatgtgcctatctattttcctgatggacctataatgaattatctttgttttcctcggtgcattacatttaacaatgataatgaactaatcttaaccgatactgaaaattgtaggattttacgccttgtgattgacgacactcttattaaggaggagcattcaaatgaaatataaagttgattcggcacatggtggtgaaggttgggtacctagaaagcaagatcactctacagaactaggtcatttctggaataactgtggcgtaaagggcgaattcggtaccctgtcacatgttttacttagaagtccaggtctagaggtagaacaaaattttaatcctgctgatatcctatggactgagagaatagaaccatcgaaagcaagagaacagcataataatcttattgaagtttatcgctcccaaggggtagaagtagacttaattgatgataaagcagctgaatcttttccaaatattttgtatgtcagagatttgtttacaatgacagatcaaggagcaatcctatccaggatggcatcagaggttagggctggagaagaagtaattatttctaaaaaactatctgaactcggtatacctattttagcctctcttcactcggatatgatattagaaggtccagacatattaatagtcaatcctgatctagtatttataggttatggtataagaacaaattataaagcagctatgtatgtcaaacagatactattaggattgggatattccgaagttatcatcattcaaactacttatggctgcggacacttggatggtgtagtgaatattttaaattctcggtatgctgccattgttccaaaaagagtttcatatgagttgtacataggattaaagaggcatgggttttcaattattgaacttgacgacatgtatgaaatagatcagttgatgtcaattaatttcgttcagctaaacgaagagactcttctgattaataagggtgccaaaaatacagtgtctcaatatagctcatgtggctttgaatgtctagaaatagacattagtgaattaacaaaaggaggcggctcaattcattgtttaacagggattttaaggaggatttaacgagatgggcgtttctatagtaattccaattaaagttaactcaatcgatgaaatatatattgatttcatcaattacatcattgatttttcttccaatgtattaactaaagacgttgaaataataatagccaatggaagttctaaaaatatttatatatttgctaatgaacatcttaaacatttgaaaaatgttatacattttatcccacatcgttcaattagaacaggagacaacgataaactaaacgggatatactctgctttaatgtacactaagcatgataacattttattagttgatgatcactatagagtatcaagtgaaacgcttgcagatatattaaaatactatgaaaaatatgattgttttaagtttatgcctaaactacatcaatacccacattcagctttaattgatacatgtggaatgtttattgttaatgtattagatagtagaaagcaatattgcggccatttagcctttaaaaaaagtttatatagtgaatggggatttatcaatagagattctctatttgatgagtttgctatggaaaaacatttacgaaaaaagggaagcagagtcggatttataaaagatatcgctctggaagccaaacaagaaattccgtttaaaaaatttcttgagcagagagtacgttatgcttatgaaaacattgctactccctatcgctttacctttttcgccatgatcttaccacttttaatactgttaagcctgatagacacgaactatggtctgaattttgcattttttctaacaagctggacctttgtcatatcaatagtaggtcaattcatttatggtaaacaaatcaccccttggtacacttcactatatagtcctatttggttctggttttatccttttactacgtggatagcaatttacaagtaccttaccggaggaatcatgtttggcgggaataatattaggagggcaggatagatgaaaatcactcaaaagattatagggccacaaagtattgtatacttcaaaaaagataaaaatagagaatttgttgaaaaaatttccactgaacgaggagaagatgaattagttgatcaaattcacttttataaaatgttaccaaaagagattaagcctctttttccagccctatatgattatgatattaaaaacaggccgtttcgcatgtcaatggaattatgtgattttccaacattaaaagagattattttatacaatactaagcaaaacaagttgaaggaacacttatataatgttatacaggacatatttgaaaaaatacacaacttaaaacaaacacaggcaacaaaaaattatgtagaacatttgtatatagatcgttgcgtcaatagaataatagaaacaaagaaattaatgaaagaagcacaatggataaacaacgacttttacttagagggttcaattgtatccaacccaattcaaacggtttttgaaattataaataataataaggatttattaatacctgaatatctatgcactgtacatggacagctaggtccttctcacttaatgttaaacattcaaaagaagaatagttacaaactagttgatccaaagggatttcatgaatttcatgatccattgttggatattataaaaataggtaggtccttcctctatgggatggagtggttagaagatgacttgtataatattaaatattcttttaaaaatgaatatcttacaatagaagattttaatttaattaactatgatgaagtatatatgaagaagtcatttaaacctataatggatttagccataaataattacaaaaatgctgccctaagagtatatgccttaatttgctgtgatctaatagcaaatttaccttttgcatatttatcaggtggtgaaaagagagtagtagctttatataatctcatatatgctgctagtttagatttgtctcaattaaatgatgctgtaaataaggagaaacatatatatgaaagtctttcaaaataacagatataatatatttaattacaaggaaagttctatctttatagaagatagacaaccccattctgttcttacaatagcaaatttaaaaaatcaattagttgtggtgagacaaatgcgaaaaggaataaataatgaaaccgtcgaattgcccgggggacaggttgaagataatgaaaaacctatggacgcagcaaaaagagagctagaggaagaaactggactaatagcaaatcaatttattcaaataggtaatatttatcctctccctagtttaattaatcgccaaatcacatatttttatactgaaaatattgttggttataataagactattaaacaggatgaagatgaaaatatacatgtagaatatcacaaatttccaaaagtcgagtataatcttaaaacccaaaagtggagggatcaatttcttgcttatggagtatatatctgcaaattgaaaggaataatataaaaattttagaggttaaaaatggatgtccaatctatattatttgatcttgataacactttgttaaatagacaaaaaacttttgaaaattatttagattcatttatctccaagtatattttctataactccccgaccgaaaagaaagatataaaaaataaaataatagatatggataaaaagggagaaaaagataaaaaggaattgttttcagaattacaacatagattaaagtggagattaaccccttccgttgattatttagttgaagaatataaaacaatattcgcaaaaaacagtatagttatggatggaacttttgaggttctaacattttgcaagaataaaaatttaaaattagggattataactaatggagaatcattttatcagaagattaaactaaataacacaaaccttacatgtttttttgattttatcttaatctcagaggaattcggtaaagctaagcctcatcgctctatctttaaattcgctattgataagatggccattgatccacgaaaatcaattttcattggagacaatcttatttctgatatttatggtgcttctaggtttggattttatactgtttggtataatcactctaatatagtcaaacaaaatcccataactgtaaaacctaataaaattataactagtttaagtgaattgttgaaaataaaagactggtagccgaaaggagaaaaaagtgattattagtgttgattttctaaatcatttacacagtatttataataaaaataacgatctatccgaaaatgttaaaagaatattcaaagaatataaatgcagtaatatttatgaacacagtgtaagggtagcacatatggcaaaaaaattagctgtacggtttcgagccaatgaagaatcagcatatatagcagccttattacatgatattggaggtattgttcctaatggaaaaagaattgaaattgccaatatactaaaaatccctctttttcctgaagagatagagttcccactaattattcatcaaaaaatctctaaggttattgctgaaaaagtttttttaataagtgaccattctattcttaatgcgatagaatgtcatacaactttaaagtcgaaccctagtatgttggataaaattgtatttatatcagacaaaattgaatgggatcaaaagggttctcctccttacataaatagtctaatagaagccttagatgtttcaattgattgtgcttcaaatgtctatattaagtttcttatggaaaataaaaataatctaaaggttattcacccttggcttagtgactcttataactattttaaaaaataaccctcaactcaatactatatataatattatgtatttaaatccatcaaagttgtgtaaatattggcaagattctcttaagatagccttgtattttttgtttaacactcttagacctaggattaataactgaaatattaatggtctaagagtgttgattatattgaacgattaattaacatgttttatgtcggaaacaaggcattcaatttacactattatctttatttaccttattaaactaatatatattctattcccccccctgattcacatccaatcgaactaagtcttggttgaatgctttaattttattaattctttttataatgaataactataaacaatattattagtgtagaagattaaataatttcatttttattacaatatgaattaataattgtttttcaaaaaattccatgttataatttggtaaaccactgaaatttaaggagggttttatgagtaaagtatttgataaagaagaaatccttaaattgattccgtgttctgacaaaattgactatatatacttagcggggtcaataatggaaggtttcggaaatgatgcttcagatattgatgtttttgttataagtgaaaatccagatagactagcttatgaacctactaattttacaagagaagtaaacatacaagtaggagaatcattcataaaaaatattgttatagacagtattagatatgattttgagtactatcgttcttctagttttacttctttaatagaaaagttgaataatttgaattttaatacagaaaattatattccaaggtttacagcagatgaaatagatcttttacatagattaaaatttgctgagccgcttctgaataaaagtgcttttaatactattctaaacaatataaattttgaaaatttaaataattatttagtaataactaatattgagtcatatgatggacatttagaagacttacagggagctctttcttgttctgattttggtacttcatttgtgcttttaaaattattattaaaatattctcttaatgcttatttagcgaaatatggagagacaaatccaggagaaaaatggttatttagaaaattaagtagatacgccgaaaaacatggtgatcaacatttacttgataagtatcttaatttattatgttatccttttgagaaagataatatcaaacattatgctcaaaaaactattaattttactcaaccattaattatcaaagctcaaaaataaaaacggagggaagtaatcacatgatttatcaaaaaaatatgtttgtgagattccgtatcatcgatactaaaccttatcttattcttaatgacaatgcatttatcttagacgatgtaggcgttaatatttgggaatcaattgatagcaaaaaaaatattgaagaaataataaataaaatctcaaatgtttactcagtagagtctaataaaataactaaagatattaagaattatttaaaagatcttgaaaaaaacggattaattgaagtgtgtaaagaaatctcataggtagttaataatgtctggaatgggctcctttagtggaggtgagattaatgtataaaaagcctgtattaattaaggtgaagcttcctgttgcgttagagtttgtttaattactacttaactgattgacctatcttttatgaattgaggtgagattaatgtataaaaagcctgtattaattaaggtgaagcttcctgttgcgttagagtttgtttaaatctaaaaccagactaaaataattgatcaaaaaatcaaaggagcccatccctaacattattattaaatcaacaactactcataaaattttaggagtaaggtatacattatgctattagaagaagttttcacgtatatagttctttttgttatagttaaaacatgtatgtttcttataaggaaaattaggggtaatcttttatttgatgtgctaaggaatttattatttttcgtcccttttattttaccagcactttatttaggcttacctaatttaatttttcaaggttcgattaattattatttattatccattttttcatcatttttagctttaagcattaagtataaagaatttaaaccttacttcaataaaaatttttaccaaatcctcccgaaaatttcttttaaagactttttaatattggaaatatctttgataggaagcgctatttttgaagagtttttttacaggagttttgctcctcactcctcttttattgtaggcatggcattgtcaggaatcctatttagtattgctcattatatacagaactatacaagaagttttttcgatttaaagacatatattttattgtttttattaggaatggtttggtattggagttataaaaatactgggactttaattccagcaattttaggtcatttagtatataaccttcctagtatgattttcacctattttcactttaaatcatcaagatttcggtgaggaaaaagggggttataatagtgagtagaatcataattgcaactataaaaagaaattatatagtttcaaagagagtttttccttggtcttttattatagccagagttcttatgggaatctatgtttctgtatttgctttttttacttttaaatatatgtttgatggaaaaacagaaagtcattttttaaagtatagtaatgggatagactatataagctttgtagttctaggagccggtctttatacatattctatatctgtaataatgaatgtaggtagatctcttatgttagaaaatatagaaggtactttagaaagtatacttgtctcaccgtgttcacgtttagggtactttttaggagttttttttgaacaaataggtagatcaagtttagagtttctaatagttatatttttcagtttatatttaggtgccaatattgaaattgagaacactattccacttttaatagtaatcattattactacaatatctcttttcagtattggtatatttatagctactctaatgttatttctacgcgacacctatataacacagaatactttatttatagttatgggattagttagtggagtatcttttccgagggagtacttacctaatatcctctactatttatcctatttgtccccattatcttatgcactttctttattccgaggtgttatgacaggacaaaacattttaaattacacaaaggaaatcttggacatatttgtcttgagcctagcttattgtctttttggtttactttggcttaaatgtctggaaaaaaaaatattagaaaatacatttaactaagggtgatagtaaatgctaattgccaaggatattagtaaaacttatatattgaatgagagaaaaggtttttttataaaaaaaaaaacagagattaatgccttgaaaaagctgaacttaacaattaagccgggtagtattgtagggttattaggagttaatggcgcgggaaaaagcacaactattaaaatattatcgaccattctagcgccaactactggctccttgaaagttaatgaagtcgatgcattaaaatatcctgtagaagcaaaaaaattgttaaacgtaataactggtggtgaaagaaatttatattggaggttaactgctagagaaaacctcgaatactttggagcattatatggactatctaaaaaagaacttaaagactatataccatcatcacttagtttggttggattaaaagactcaaatataccagtcgagagatattcaaaagggatgaaacaaagattacaaattgctagggggctagtaaataatcctaaatatttatttttagatgaacctacattaggcttagacataaatattgcaaaagatttaaggcaatacataaaaaaattagctcaccaaaaaaacaaggggatattattaactacccactatttatctgaagttgaggagctatgcgattgggtttatataattgacaaaggaaatttgctcacagaaggcactccttcagatattgtatcaaaaataataccagaaattcaattgaaaatagaattgtcaaatctaagttgtgaattaaaaaaagaattattgtactatgttggtgcaatagatgctaaaatacattttttcaaagatcatactaattactcgattttattatcatcgaaagacgatttaacttctgatttggttaatattataacaaaatacagaacttccattctaagttttaaaaccgaagaacctaatcttgaggatgcattattaacattaacaagtaaacaaggtgattcaatttatgaattggttaaaggtaattaaagctgaaatatataaacaacataagaattcatttcattcaacaaaagcttatttttcattattaatatggccaatattaaacttaattaatgcctacttatgttacaagccttttaatttaaacgatttaaaattatatagaattaatacatctgacgaattaatatcctttttattaataggttttttcacttatatttcttttaagtcgttaatgcaaagtgctttacaaatgagttatgaaagatcaaatggaactttggaaacaatattcttatccccagcaaatcgtttatcattaatatacggaagaagcttaggatttatattcggtaatatatggatgttttttgcgtttactttttttataatgtgttatatcggatcaatacctatatataatttagtctattttccaatatgtttcattctaatcgtcatttcagcaactttatggggaggcttattaaatactatctttcttttttctcgagatgcttcgatattgtttatgattattgatgatcctatgatgttattttcaggtgtgagaattcctctaactcttttcccaatatgggcacaagtaatttcttttatatttcctctcactcatgttttagctgtagtcagagacttaatgttatttggagatatctcgttatcctcatggaatcatttattatacttattatcagaattattatttatgtatatgataactttatttttgctatcaaaagctgaaaaacatgcccgtattaatggagaattaaccttttattgaataggttaaaaaaaagtaaaaaatacttaattaaagtattttttactaaatttatttcttatagtttattttttaaactacatgttttttatacttttatttagcttgattacattgttaactaaggagaaatacctttgtctaaaggtgtttctttccttagttaacaaatcaatctccaatcatcttactttttttctgacagccatttggcaataacggcggcttccttatcatctacaagccccttcggcatattgccgcggccgtttttaataatgctttcaattttgtcttcgtcgtatttgcctccgacctcttgaagattaggccctgacacaccttctaaatccttgccgtggcagcctacgcagctttgctgatataattcttccccttcagatgcagaggcttcagtcttgctgcctgtatctgtcttctcttcttttgcatcatttgaaccgcaggcagccaaaagaactgaaagcgtaaatacaagcattagtatcgataactttgatttcatgttgagaagcacaactcctttacgatctcttccatattataacctcgtttaagcacgtttgaaaccctcgcccagcacctcacttgcatccgccacaatcacaaaagctgactcatcaatctgtttgacgatttgtttcaatttggtgaattcagtttgcccaaccacgcacattaaaatcggacggtcatcgtcagtatatccgccgactgcagagatttttgtcacgcctctgtcaatcttctgtaagacagcctccttgacagcctgctcctgctttgtaatgatgagcgccatttttgaacgattaaagccgacttgcacaacatcaatggttttgctggacacatagacgccaagcatggcatataagccttgctcaatattaaatacaatcatagccgtaacaacgatcattccgtcaatgatggcgagacacttccccaatgacagaccggagtacttatgaatgatctgtgcagccaaggctgttcctcccgtcgatcctttccctaagtacacaataccaattccgatacctatcccgacaccgccaaaaatcgccgccaggagttcatgatgagtggcgggctgaatatcccttgtcagaaacactactagcggcaaaaacacagaacctgcaagcgtctttagtccaaatttcccgccgagcaaaatgacgccagcaataaataaagggatattaataatccactgtacatacgctgcttcaaaaccatatgattgtaaaatcgtactgatcccgctgacaccgccggcggcaatcttgttcggaagcaaaaatacattaaaggacacggccgtaatcgctgctcctatcaatatgtatacataatcccgcaaaatccacaatgttttattccgtacgtccatcatatatcctccgtttcttccaatgctctccgatagcattttaatccttccctgattagatgtaaataacacccaaatacagtggtaatatgctaaagcagcagtgaaatcaaggatataaggaattaaaaaaacacacccgttgcatcaggtgtgtttttcagcttatgaaagcttagaacgcaggtaggcatcaataaacgtatcaatgtcaccatccattacagcttgaacgttccccatttctgtattggtccgatgatcttttaccatggaatacggatggaatacataagaacggatttggctgccccagccgatttctttttgttcaccgcgaatttcatccagctctgcctgctgctcttcaattctgcgctgatacagcttggccttcagcattttcatggctctttcacggtttttaatttgtgagcgctccgtttggcatgtcacaactacgttcgtcggcaagtgagtaatccgaacggctgaatccgtcgtattgacgtgctgtccgcccgcgccgcttgcacggtacgtgtcaactttaatatcctccgtacgaatatcaatatcaatttcatcgttaaattcaggcatgacttcacatgaaacgaaagatgtgtggcggcggcctgatgaatcaaatggtgagatccgcacaagacgatggacacctttttctgctttgagatacccgtaagcgttgtgtcctttgatgagcaatgtcactgacttgattccagcctcgtcacctggaaggtaatcgagtgtttctactttaaagccgcggcgctctccccatcttgtatacattctaagaagcatagagccccagtcctgtgactctgtaccgccagcaccagggtgcagttctaaaatcgcgttatttttatcatacggctcgctgagaagaagctgaagctcaaactcattgaactcttttgttaatgattttagttctttttcaagctcaagctggagatcagtgtccggctcttctttcaaaagatcatgagtcatttgtaattcttcgtgggattcattcaattttttatacgaattgacataatcctttaaaccgtttgcttcatttataaccgtttgagctttttgctgatcattccagaattccggatcagccatttgttcatctagctcagcaatgcgggcctcctttgattcgaggtcaaagagaccccctaaagtccgctaaacgagaagccatattttcgagctctgctctgatttctgataattccatttcattcacctcattaaaagatccgcaggcgcctgcacgcgccgcggtcagtaaacttgccggggcgaactattcagtacggccgcagcaatttttatattttttcccgcttccgcagtggcatggggcatttcgtccgatatcaaccactttgcgaaccggtgctttctttgcttttttgttatcgtcgccttcttgcggctgatgagctgttgtttggccttgtacaacctcttcacgctccagattgttttcaatctcagctttcatcacaaattttgcgacttcgtcctcaattgattcaatcatatgctcaaacatcgcaaagccttccatttgatactcacgaagcgggttcgtctgcgcgtaagcacgaaggtgaatcccttggcggagctgatccatcgcatcaatatgatccatccatttagaatcaacggcacgaagaacgataactttttcgaattcgcgcatttgctctttgccgaattgctcttccttctcattatattttgtgatgatgcgatccataatgagctcaagcatttcatccggttctttcccgaagatatcgctcttctcaagcgcaccttcatcaagataagttgtgttgataagatcaactagaccgtcaagcttccactcctcaggaagctcttctcttggcgtatagactgcaattgcgcgttcgagagaagacttgatcatattttcaacgatttcacgcaggttttcagagtcaatgacttcaaagcgctgcttataaatgacctcacgctgctggcggagaacatcatcatattgcagaagctgtttacgcgaatcgaagttattgccttcgacacgtttttgtgacgattcaaccgcgcgagataccattttgctttggattggagtagagtcgtccatgccgaagcggtccagcatcgccattgtccgctcagctccgaatctgcgcatcaattcatcttccatagaaagataaaattgagtaatccccgggtctccctgacgtccggaacgacctcgaagctgattgtcaatccggcgtgattcatgtcgttctgttccgacaacagcgagcccgccaagctcttttacaccttcgccaagcttaatgtccgttccgcgccccgccatgttagtcgcaatcgtaactgcgcctttttggccggcctcttcaatgatctgcgcttcacgttcatggtttttggcatttaacacttgatgcggaattcctttgtttttaagcagcttagaaatcaattcagatgtttcaacggcaaccgtaccgacgagaacaggctgtcccgtcatgtaacgctgtgcgacatcctccgcaactgccttaaactttccttccatcgtgcggtaaattaaatccggtcggtcatcacggacaacaggcctgttggtagggatcgtgacaacctgcatgttgtagatgttgcggaattcttcttcctctgtcttagctgtacccgtcataccggcaagtttttcgtacatccggaagtagttttggaatgtaatcgtcgccaaggtcatgctttcgttttgaatctcaagcccttccttcgcttcaatcgcttggtgaagcccctcactgtagcggcggcctttcatcagacgtcccgtgaaggaatcaacaataacaacctgtccgtcttccactacatagtcaacgtccttttgcatcgcaacgtgagcttttaaggcctggttgatatggtggttgagcgcgacatgcttcacatcaaagaggttatcgatgccgaatgctttttccgccttcgtcattccttcttcagtaagctgtacagcttttgttttgatatcgtacgtgtaatccttctccgcttttaacgtgcggacaaaagcatttgcctgtacgtacagcttagtggattttgcagcttgtccagaaatgataagcggtgttcttgcttcatcaattaaaatagagtcaacttcatctattaccgcaaaatgaagcgggcgctgaaccatctgctctttataaagaaccatattgtcacgcaaatagtcgaagccaagctcgttgtttgtggagtaagtaatatcagcggcataagcttcccgtttttcgtcttttgacattgagtttaaattcaaaccgacagtcaaaccgagaaactcgaaaattttccccatttgctcagcgtcacggcttgccaagtattcgttgacagtcacgacgtgtacgcctttaccggttaacgcatttaaataaacaggcagggtagacgttaatgttttcccttcccctgttttcatttccgctatatttccgtcatgaagcgccacgccccccatgagctggactttaaacggaaacatgcctgttacgcggcgtgaagcttctcgaacaacagcgaaagcttcaacaagaagatcatccgttgtcgcccctttttcaagacgctctttaaattcaattgttttatgtttcaacgcgtcgtcagagagattttcatagtctccgcgaatcgcatcaatatcgttagcaattttttcgtatctattcagcgtacgttttgttggatcaaacattttatttaaaattccaagcatttataacgctcctctatcttcacatgcctattttagaggcatgtataaataatttactagtccatgtatacctctcattatcatatcataccttttgttatttccaaagaatttgcaaataagaaaaacaaaaaccttccgcggacatcacggaaggcttctcttcattattcagtcggttcaattaagccatatttcccgtcatttctgcggtacacgacatttgtaaggtttgtttccgcatttgtgaaaacaaagaaattatggccgagcatattcatttgcaagatcgcttcttcactatccatcggctttaaattaaagcgtttctgacggacgatgtccaagctctcctcctcttctatgtcatcctgaaccgcaatatctgtatcagagccaagaccgtttgccaataaatattttggagagccctgctcacggaatttacggtttactttcgttttatgcttacggatttgacgttccagtttgtttgttgcgagatcaattgcgttgtacatatcctcgttatgcacctcggaccgaagcgccagatctgtcatcggaatcgtaacctcaaccttagactccttgtcattgtaaaacttcaagttgacgttcacatcagcatccacgctatggtcaaaatagcgctccagcttgccgatcttcctctcgacatgatcctttaacgcgggtgtcacttcaatattttctcctctgatgttatagttcatcaaagaacgcctcccttttattaaggatatgtatctatttctcttttaccctttacaattcctgctgaaacataaatcttttgtgaaaattcagtgaactttgtcgaattttgtttgtatttgctctgttattggcggttcggaggtatatgtatatgctgattgaacgaaacaaatacctcacacacgcctaattgattaaaaagggttccatacattgatgaatagacagcatccattttctataatgaatcagaaaatgttcctttaaatactcacagaactcatgagagggaaaagagaaagagaccaattgatcaaactccgcaaaaatttggtcaaatgctttcacacaaatttcagcacaccgcgaatccataatgaagagaagtgttgaatgtgttgaatccaaataaaaaaaggcttggatcagatcttggtagatccgatccccttctgtttttgataaattctcttcagcctctatcaaataacacaacccctcttcgatggtaaaaagaagatgataataagctgataaaagcgtataatcttcaatgctcttcaaggcactcacctatttacgcttgtcataatatgtgccgtcaatcgtaatgttgttataagggtttaaatacgtcgtatgcatcacacgttttcttttcatctgctgaagttctgttgcgattgactgcttcagtctttccatttccttcacaatcagctgatcccatgtcaaaataagtttcatctgctttctctcttcttctgaaagcggcagagatatctcctgaatcagttcagaccgtgtagccacaaagtcttcaatttgctttaaaagttcatcgctttccggcgtattttgtatgtgtgacagcatactcttcgtctcagtgtatagttgatctatattattcatgcgatcccgcctgatccgtgccggtccttccgttcactttgaattgcttgtttccaagcatcgcgaaaatctgttacataaccttcaacctcagccagcatgcccgtatcatttttgatatttgcctgtaccaatctgcgatacatataatcgtacatcgcacccatagaagcggaaagctctatgttacggttaagtgtaaaatttaattcctgaataatattttgcgctttaatcagattttcatttttacgttccatatcatcattctcaatggcctgagcggcaagtcttataaatttcaaacagccattatacagcataagcgtcagctcaccgggtgtagccgtattcactgaattttgctgataggctgtataaggattttggatcgccatgtgtcatcctccaaattacatttattgtgctagaagctgtgataaataggacgattgttcgttcattttttgaatcgcagaatccattgcactgaattttgaataatagcggttttctattgtggtcaaccggtcctgcattttggtaatatcagtgctgatcgtatttaaatttttaccgattgaataatcattggttcccattgtcgagttgccggcttttgcttcaatgctcttcaccgtacttttcagggtgtcaccgatgcgtttcataatccctttatcactataggcgctgctgttcgatccacttgtaaataaagcggcgacactttgcggatcttcttgtattttagctttcagtttgtcttcattaatttctagatgtcctcgcatttggtaagcaccagacgttgtgatgccaaattcagttaattgataggtttttccatccgcactaacttgagaataaaaatcagtccgcatttgattcgtaccagtgcttatgctggtatcatttttcagcaaaccgctttttgccttctcttcccagagttctatctctttatcggacatggcttctttttgttcactcgtcagcggcgcatagtctctgtatttttcttctttcaacttttcattcaggctgtcaaccagttcattgtatttattcacaaactctttaatttggttgtaaatcccgtcaacatcagtagatacagatgtggtaacagggcctgtggctgcagttgtatttttgatcgaataagtaacgccattcactgtgaagttgtttgacagcttctccatttcaaagccgttgatggtgacttttgcattcgttccttctttgtaagcagtaatcttattatcagtgtccaaagaaaaacctagctggccagacataaaatctgctgtagcagagtctgctgcttgtatactgcctcctgcacctgttgctttagaagaaaacgcaatggtttccacatactctgtaccattccaaattttatctttaaaagctgatactcctagatctgagctgttaagtttagaaatcacattatcaatcgtatcagcgctcgtcacactaatgttcactgtttttgcggctgtctcaccaggcgcaacaacgttaaatgccaaattataatcgccctgtgtgtatcctgtataattgtttgccttatatgtcgcagcagttgccaaacttgctacttcaatagtagatgaagagtttgctgcacttgcagttcctgtagcagttaacacagattcgtttgagcttgatacggttttactctgaaacgtactcggatatgtcagcttattattagacatataatcttggaattcttttattttcgagtttacttcacgatagctatcacgctgccattcaagagtctgctttttttgtgttagcttattaagcggtgctctttctgtctgcatcagctttgatacaatatcatctatatccattcctgacgccagacctgttattctcgtgaccatttcaaaccactcctaatctactttttttcatctacaaataacccaagaaattcagtcatagctgcataaaaatctagccaccgccttggcggaatttcacggatcacttcatttgtagagtcctctattacttttacatagtattcatttaacttctcatggagctcaaacttcagatgaacttgcgaaggttccaaaaacttgttcattccctctaccatttcagcaaggtcggtatatgaaacttgatgaacaggaacctcactctcatgatctttctgattatgtatttgagtatcatagcgatcccaaacaggttgtaacgtagtgagcctttcaatgttcaattgatcatcccctatgccccaatctatcgtttatatcgactaaatcgagataacattacacatatttttggaaaaaatctcatccgttttagatttcttagtttggaaatacgtttataaaaagtaagtggagaatccggttattatatcatgatttaataacagcaagtggaatgattcggagttagaaatataaataaaagaccttggcaacgccaaggtcctctctaaaattaacgtaacaattgaagcacgttttgcggctgttggttcgcttgagcaagcattgcttgagaagcttgagaaagaatgttgttctttgtgaactcgctcatttctttcgccatgtcaacgtcacggatacgagactcagcagctgttaagttttcagaagaagcactaaggttgttaattgtgtgctctaagcggttttgtaccgcaccaagttttgaacgttggcttgaaacgctagtaattgcagtatcgattttcgcgatctcagtgtcaaaactaaaagtagctgatgaaacatcgatcccttttactcctaaagttgttgcatccatgttgccaattgtaacattaatgttttgggtagcatttgcaccaatttggaatgtaaatcctgctgttacactaccgtctaaaagtttttttccgttaaattcagtacgttgagagataccatcgatctcttcagttaaagcatccatttcatctttaattgcagttaaatcttcaggttgctgtgtacctgtgttaccagcttgaacagtaagttcacgcatacgttgaaggatggcatgagtttcagtcaatgcaccctcagctgtttggataagagagattccgtcttgagagtttttagaagccatatcaagacctctgatttgtcctctcattttttcagagatcgcaagaccagctgcgtcatctcccgcacggttgatacgaagacctgaagaaagtttctccatgttcttttgtgctgcaccgttgtttgaagacaaacggttcagtgtgttaagcgctgcgatattgtggttaattctcatttttatttcctccctgaatatgttgtttaggcacgtccttgtgcctcaattttgtaatcggcgagccatttgtgccctctcccggctacatcattaatatcggattgtctctgattttgttaatacaaaaataaaaaaatcctcactttttttgtgaggataatgcggagatcacatcgctggataacgacgccgcacggttattttcttcctgaatggttaaataaatctctttccgatgaatatcaatatgctttggggcttcaattccaagcttcacttgatccccctcaaccgcaatcacttttacttcaatatcagcacctatttgaatcgcttcgcttattttccgcgataaaactagcatgattctcctccaatcggatgctttgtcgtatatgaggagtcgtgtaaaacgacttgcttagccatcatgttcttgcgattcacaataatgggagccaataaattcgcagtagacttttcaaatggctctgccatagtcaatattgtcatgacttctacgtcttgaatattatcgatatccaaaagttcagcagttgattcatcaagatcaaattcataattcttaaaaaagataaacggacttacgacgataaacgcaagattttctgaagtgacggactgcagtgccacgaatggagagtcttctgaaagcggaagtatgacaaattgtttttcttctaaaaagcctggaatcccgctttcaaaaagaatgatttgttcttcttttatgttcatttggccatggtacttcgtatgaatgatcattgttcacgatccttttctttttacttttcgggtgattctttcgggtattctacatctatatttaaatcagggtattggagcatgtcaaccttaacatttcctggcgtatattcaacaattggcttatgcggctcagcctgaataacaggctttcgcggcgtaatctgaacatcaagctgtgacggagtatattgtattttcaccctagatagagaaggagcataattttcgcctaattgaatttggtgcatttcagagttcctccttgcttgtgaagcgattgggttccccttattttcaatcctcataagctcgtcgccttcttctgcagtacgcgctattccctccattacatcctcatgcccttgttgtgcggcttcttcaattctcttgaaaacatgctttctgtctaattcttcccatgcttgtgtctggtcaatcgtgagttttccaggtgtcaccgatatttccatttccgcactcggctgttcgatctctagatcagcttgaggctgctccatttttaagctggcaggcgtcgttgttaaaccaatttttccttgaacactatgcataatcaatctgggaatctgcatcactctacctcctgaactataaaaaaagcgaactcctgagagccgcttactttaaaaagtcaattaatgtaggctgaacaatttgcgcattaacggccagagtagccctgtgcacactttgctgcgcaataaattcagttattacttcttccagttctacatcttcattgtctgataacactttggtagctgtttcttcttgcgctgacagtcttgtattaaccaattcaagacgattatatctcgctccaagatcagatcgttcagcactcatgccgtcagaaaaatgatcaatatcatctaaaacactgtccatgccatctagcgaaccagaatttagtgctttctcaaaagaatcaagcatttcaaatacattctgcccgctttcagaagtgcctccaaaagctgactttggatctgaattcactttcaatgacatattatttgatatattgactacgacatcagctgtatcagaaattgtataagttccgtctccgttatctgtaaccggaggcttatctgaatttgtgccattaaagatatatctgccgttcacttgtgtattcgcaatatttaaaagctgttcctttaactgctttacctctacgccaatcgcttgccgctccgactcgccgtttgtatcattttgagcttcaaccgctaattctctgacctttgacaagatgtcaattccttctgtaatgtttgtttctgtgttttcgagccaggtaaaggcttgagaagcattgcttttgtactgctgcacttgagacagttgcgtattatactttaagcttttcattgctactacaggatcgtcggaagcttttgagatttttttccctgaagaaatctgcgactggagtttatccagcttcgagtagctcgaaccgatatatctcagtgagttttgctgtatcatgccttgtgttactctcatgtgactctacctaccttcctccaacacccatgccgttgatcactttatcaagtaattcgtcttgtaaagtcaccattcttgcagctgcattgtatgcatgttggaattgaatcatattcgtcatttcttcgtctaaagaaactgcgctcatttgctgacggtttatgtcagcatcatttagctgtgtttctgtattagacgccagtcgattagcctcttgagcttcgatccctagctcgccaatcagacccgcataataatctaaaacactagtttctttaccgttaatggttattttaccggttaaaacatttgctaattttgtagcatttgcgttatcgttggctgcaccagtcagtgagaaagcaatgtttgcgccttttgaatctattatgctgtcagccactttgatcttgcccgccgcgcccttggcaggttcagtttcaccgccagtaaaatcaaaaaagtctccgccttgttcaccgctcttggtcacaccatttctgtgcacttcattgaaagctttcgcgaattcaagcgccatattgtcaagatcagaaagcatttccgggtatacgcccttttcttggccgtctgctgttatatacccgtaagactctataaatcctaaaagggatcccttgctgctaaaggactccgcctgcacagctgtatccccgattgaaatacttgatactaacccagtttcattatcatagttggctgcaagttctgaaacctcgtaatttttaccgtccaaaacagttcctagcgactgtttatttttatcaaggatttcaattgatacagttccttcagcagatgcaagtgcattcccgcctgatttgttgtagttgactttgatatcaaccattgaggataatttatcgatcagcaaatctcgctggtcatataaaccattcggaagaagcccgaccggctctacttgtgcaatttgcttatttaaactgtttaattgagaaagcagagaattgacatccaacacagttgtatttagctctgcttttaaattcgattggacatttgtaagtgattcagaaatataattaaacgtttcagctacagcttgtccttttcgagcaacaacagaacgtgcactttcttcatttgtattattcgataattcctgcagagaattccaaaacgaattgagcacactgttcaagccgctgtcatccgtttcatttaaaacgccttccatttgggacagcgctttggccttcgtgtcatagtatccggcactgttgttttgaagacggtattggtagtcaagaaagatatctcttattctctcaactgattttccttgaacgcccgtacccatttgtcccgctgttttttctgcgtttttagatacagcagggaaatagtcagttgcttccaatgagacccgctgtcttgtataaccatcagtattggcatttgccacgttatttgcagtcgtgcttaacgctgcctgctgagcgcttaacgcccgccttgcagtttcaagccccataaaggtagatgtcattttctgaattcctttctgctaagcttttgaatcaaacagtttcattttgctgcttttcggcagctcagctttaattgatttgctgtaattgaagttattttccttaggaaccagcatatcgtacgaaatagagatgaattgcagcgcgtctcttgtcagctgcctattcatctcatttacttttttcagacgtccgagaacttgagaaagagattcgtatagttgttccagctcttccttttcactgcctgaggttttggtgatacatgcggaaatagtattattttcgctatatccgagaaaggccgaagttgttttgatccggtcatcttctgtctgcgtgattgcttgaatatatttttgctcttttgtcaaaatgttagaaagctcttttgttttgccggctttgagcgcttccgtcttttcttcagacagcgtgagcaggtgctcatgcagaacgcaaagtcgcttcaattgttcaataattgccttcgctgacatgggctttctccttttttattgctttttataaaaattaatcatatttttcgcgatatgatttgcgtctactttgtatgacccgttttcaatttgcgctttaagctgcgcaattttttcctgtcgtgaaccagtgactgcgtcggatgcatgttgcatttctttagcctgtgatgaaatttcaattttatcttgaggctgtgcagcagttttttgcaccgcttgcttatcataatttttttgatatggattaacggattgtgttccaaattgattgattttcataggattcctctcgctttccgttgcagtctttaaacaatcttaacccttttatcgactgcgttttcagttagtttagggaatcagctgtttttggtattataggcatagtatgtgtcttttttactattttctttctcgattttcagagcatcctcgtggttcaaatgatccatttgatccttaatatcggactggcaagccttgcagaatttgccttctctaatcgatgtcccgcacctttcacaagggtatgccaaattaggaagatgagtgatctgaattcgcttctgcctgatgaatttcaatatcagctcttcttccacacctgtttcctcagttatccggctcaaagttgattgccggttttcctgttttcttaaaaatttatagacagtctcaaatgatttttcttcttccttaatacacgcctgacatacggtttgcagctttgtttttaaaaataaagcattgcatttcggacaattagccagttctcccatcttttttctccttattagataatatgcctgtgtcaatttctagtgattatatcggcataaaaacagaatcatttagcttctgatcaaggtaaaagatgacactgaagcggcttttcctttttctaataagcagcgggctgcgaagtgcaaggtggcgcctgttgtataaagatcgtctattaaaatgatattcatacctgctgctgaattattttttgtatcaaaaatgcgctctgacagcaggcgttctgttttctttttctttgactgcttctcattattcaggcgaatgaggggatggtgggaaggccgatctaaacattctgccaagagctgtgcctggttaaaaccgcgctcttcttcccgttccttgctcagcggaataggtacaagaacaaaatgcttatcggggtaagccttagaaaaggttgaagaaaaatcacttttaaatgcatttatgatttctgcatctcctctaaatttaaaacgggagagcgcttctttcatcatatcattatatgtgtaaactgaacggttttgacgcaatagcaaactgtctctgatccttgttctccacacctcgcaatccctgcatacggcatgaacagattgaggtctgccgcacagggggcagatatgtcctgtgattttctttaatttgcttctgcaagaataacaaaccttttcatcaggctttagtaaaaaaagggctctccatgtaacatcttgagaaaattgcgaatcacataataaacagatcagtttatgaatgcctcctcctgcttcgtttgacataaatcgcttggactctctgaaactactgcagcagattcagccaaaatgacaagcattgctgtgtttttttgtttatctaccagctcagctttcgtatatgcgatctttttaagatcagtaacgtaggatggactcactttgtttaaagaaagtgccaatacatcgttttggcatacttggcaagtacaggccatatgaagctggtccatatatcggtcgagcagttctttcattacgatttcttttgaattgacaagcatttttacagctcctcatcatcggttatatgagtatactgtaccacgttttcaaataatggctagtctgtacattcaacttttgctgccaattcattcatttcttttatatgctttcttgcatcgagcatactctttgttttgccgaagtgaaagtaaatgacatcgccgtccgcatattctttatgccggccggttcttcctgcaatttgaacaagtgcgctttccgtaaagatagacgattccgctcctagtacacccgtttgcaccttggggactgtgacgcctctttccagtattgttgttgtgattaatagatcgagctgaccatctctgaattgctgcactttctcctttctatgcttgtcttccgcgtgcacagatgcggttcggcaatgaacacctttaaagcacgcagcagccttttccagaatagaaacggaaggaacgaataaaaaaacaggcctcccttcttttacatgaaactctatccatcttttcaccgctggcggaattttatttcggtttaatttcttcttccagtttccacaccatacaaagcgcggttcgggtaaaggtttccggtggtgtcttgcggggatgcgaactgaatgtaactgtccgttcagtgcttttctttttaattctttaggaggtgttgcacttaaataaacgagggtgctgtttttctttcttgctttttgaacagcgaattgaagggtttgatcagcagaatatggaaaagcgtcaacttcatcaatgatcataacatcgattgcatctttatatcgcaaaagctgatgcgtagtggaaatcataagcggagatagccgccctttgtcatcgcttcctccgtaaagcgctgaaatgtcagcaccctgaaaggcagccttgagtcttggagcaagctctaatacaacatcggtgcgaggtgttgcaatacatacacgcagtccttgatttaacgctgattctataccaggaaacagcatttctgttttgccagcgccgcaaaccgcccagatgaggagctcttctttttttgatattgcttcaattaaaacattggcggctttttgctgtccgcttgaaagcttgccatcccatgtcagcttaatagacttccagtttgattcattttcctctttccatgaatataaaggaacctcctcactcactctgcccatcatgacacaggaacggcaatacagcttattctttccagatgagtgataaaaagaaaaataccgctgatcagtttgtccgcacctattacatctatatctccgtttatttatggatatagaattttcagcagtgatatatccattcttgatatgccattcaatcatctcatcggaaaatgagagctcagtcctgagcaaatgacggcttcgaagcgtctgctgcaattcttttgaaaaggaactgtttttttcaactggcacattcacatagcacgcctcctttcgaaacagtatgcctgaatgaatattttctgtccaactattaaaataagaatataaaaaaatctccgctctaaaaacggagatttggccttatttaaaacaccagcaaattcctaacgcaccttcacccaaatgagtgccgattaccgcgccaaaatagctgttataaaattcaacatgaggatattttgcagaaagctcttcaatgattttcgctgcttcttcctctcgattagcgtggataacagcagctcgcataggcaaccctttactcgcatcttcgtctaaaagctcataaattcgcgaaattgcttttttacgtgtgcgaatcttctcaaaaggcacaattaccttattgtcaaaatgaaggataggctttacctttagaagactaccaatgaaggcttgggcgctgcttaatcgcccgccgcgctgaagatgggctaagtcatctaccataaaataagctcgaactgtttttttcatttcttccagttcttttataatatcttccggcgatgatgctccgtttttgattaattcagcagctttaagggcataaaagccttgagccaagcagctgatctctgagtcaaatggatacacatcaatattgtcgaccatcgaatcagccgctgctgcactgctgaatgttccgctgatcccgctggaaagatggatactgataaccgcatcataagacttgccaagctcttcatacaacgcaaccagctcgccgattggcggctgagaagtcgtcgggagctcattatgttttttcacttcttcataaaagcttttccagtccaactcaatttcttcacggtaagtctcctccctaaaaacaacctggagagggatcatatgtatctgatgttgttcacgcatttctttcggaatatatgccgtgctgtctgttacgactgcaatattcatagcttcgatacctgccttattgctttataactctattgtaagggaaacggcagcctaaaaaaagacctgcctagtaaaaggcaagtctcctattatactatctcatttctacccagccatttttaatggcgaccacaacggcttgcgtccggtcgtttacattcattttttgtaaaatattgctgacatggtttttaacggttttctcactgataaacaatgattcaccaataccgcggttgctttttccgtctgcaagcatctgcagcacttcacattcccgcctagttaaaatatgtaatggtctgcggatttcagggtaaacctcatgttgagggtgtgcagaaactccgcttgttgcaaggcggcggaattcgttaacgaggttgtgagtaaccttcggatggaggtaagatccgccctcagccactactttaaccgcttcaattaatgtatcagcatccatctctttcagcagataacctcttgcacctgttttcagggcatgtgttacataattttcgtcatcgtgaattgatagaataattactttagattcaggatacagctctacaagctgttttgtagcttccacaccatttacgtttggcatattgatatccatgatcacaacatcaggatgatagtgctcaacaatacgagccgcttcgtctccgtcatcaccttcggctaccacttcaaaggtaggttcaaaatccaatatccgtttaacaccttcacgaaataactgatggtcgtcgataataacaatgtttactttagtcacaagccacgcctccttgtattattgttctatatactctagcattcggtcaatatgccttttggctctattttacaaatcatagtcaaagagataacggaaccttaatcataataaatgtcccaagacctattttcgaatctattgtcatcgttccttccaataaatctactctttctttcatgcccagcaagccgaatgatttgtttttcttctctttcgcttccttcaggtcgaaccctttaccgttatcttttatcattaaaatcacaaaatcctttgtgatctcaactttgactgtaatttcttcagattcagaatgctttagcgcattagacacagcttcctgtgcgagcctgaagagcgcaacctcaaactgaggcgctagcctctgatcctctgtttctccaatgcactgaaaatgtattttgaccttcccgttatattcctcggttgtatatagatattttcttaaagttggaatcaggcctaggtcatcaagggccatcggtcttaaatcatatataatccttctcacttcgtaaagggcattccgaacattttggcggagatttttaatttcttggaatccgtcctctgcgccccggtcacggaaaatccgctcgattaattccgatctcatcataacattcgccagcatttgagcgggtccgtcatggatttctcttgagactctttttcgctcttcttcctgcgcctcaataattcttaagccgaaatcctgttttgcctgagcatcagcaagaagcagtccaacttcgcgcaaatcctgattcaagtagttgagcacaactgtaatttggcttactaatgattctgaccgctcaatgatttcctgaagccctagcaatctgcgctccaaatcgtcccgccgttcgcgcaattgcttctcacgctgctggatcatcgtcaattctacctgcagcttatgggctttttcataagcattgcggatttcctcttcactgaatctatgaaaattacggctgacctcggataaacggtttctcgcatggcgggtttgcacttcaagtttatcgccaagctcaatcacttcatacacctgctgtttaatttgtttcagttcttcgaccagctgttcatactgctggcgtgactgctccccgatttgaaaaacctcgtccttgctcccgtcaacggttttcagcatcttcatcaaaatagaatccagcactttggaatccatctttgttttattcataatttccctccgtcacggcgttgtcatatatttttattataaatgtaattgatctgcaaattatgtcgaattataatgaaagaatgcgtatattctagaaaaaaacatttttatatactatctactctttatgataccaaaatacgcacaaaaattctaaagactgtacgaatttgtataggcagtcttttatgcttagcaggagggtcagctagcatgctgcacagctattttactgtgaaagaagcaggagaacacgagattgttatagaaaaatcgcgttttatctgtcatttaagccgtgtttctaccgaacaagaggcacaggaatttatacagaaaataaagaaacagcactggaatgcgactcataattgctcggcttatgttattggcgagaatgatcatatccaaaaagccaatgatgacggggaaccaagcggtacagcgggagtgccgatgctcgaggttttaaaaaaacgcagactgaaggatacttgcgccgtcgttacacgctacttcggaggcattaagcttggtgctggcggattaatacgcgcttatgggaaatcagtgtctgaaggattaaatcatataggtgttgtagaacggaagcttatgcgaatcatgcatacttctgcagattacacatggcttggcaagattgaaaatgaattaagggagtcacaatttctgttaaaggaaatccattattcagaaaatgttgaattcgaaacatacgtggaagaaaaggaaacaaatgctttttctgaatggatgacagaactgacaaatggaaagagtgatattaaagagggagagttgacgtatcttgaaaaagccgtcaatcacataaaggagactgaataatggctgaacgcgttagagtgcgtgtgcgaaaaaagaaaaagagcaaacgcaggaaaattataaaaagaataatgttattgttcgtcctcgcattattagtagttgtggggcttggcgggtataaactttataaaaccattaacgctgcggatgaatcgtacgatgccctatcccgcgggaataaatcaaatcttcgcaacgaagttgtcgacatgaagaaaaaaccgttttctattttatttatgggaatagaggattacgcgactaaaggacaaaaagggagatcagactctcttattgttgttaccctggatcccaaaaataaaaccatgaaaatgctgagcattccgcgtgacacacgtgtgcaattagctggtgacacaacgggaagcaagacgaagattaatgccgcttacagcaaaggcggtaaagatgagacagttgaaactgttgaaaacttcttgcaaatcccgattgataaatatgtcacagttgattttgacggatttaaagatgtgattaatgaagtcggcggtattgatgttgacgtgcctttcgatttcgatgaaaaaagtgatgtagacgaaagcaaacggatttacttcaaaaaaggcgtgatgcatttgaacggcgaagaagccttagcatatgcccggatgagaaaacaggataaacgcggagactttggccgtaatgacagacaaaaacaaatcttaaacgcgctgattgaccgcatgtcaagtgcaagcaacattgctaaaattgataaaatcgcagaaaaagccagcgaaaacgttgaaaccaatattcgcattactgaaggtttagcacttcagcagatttacagcggctttaccagcaaaaaaatcgacacattgagcattacaggttctgatttgtatttagggcctaacaacacatattactttgaacctgatgctacaaatctcgagaaagtcagaaaaacgcttcaagagcatttagattatactcctgatacaagcactggcactttcggtaccgaaagttcaacagacgggactgacagctcaagcagttctggcagcactggcacaacaactgacgggacgacgagcggaagcagctattcgaatgacagcagcacaagctcaaacaacagtacaacgaattcaacaactgattcatcctattaaaaaatgcccggtccttttaaaggatcgggcatttttgcgcagaaaaaaactccggcacataagccggagtttttaattccttttcaccagccgtttataaaactttgtaaacggcttaaatttttcattcacgagtcctgtcacttctgctatgatttgcataaaaataatcaaaatgaagataataaacaaagaaagccaaattgtggcacttttaagtacaatcgcactgatactgaaaataaatccaattaaataaataactaagaccgacatccgatgtgaaaggccaaaggccatcagtctatggtgaatatgcgacttatccggcgctgaaatcggctgtttgtttaatattcttctgatgatagcaaatgttgtatcaaaaatcggtacgcctaatataataatcgggataacgatactgaacaatgtgacacttttatacaggcctaataatgaaagaatcgaaatactataccctaaaaacagtgatcccgtatctcccataaagatttttgccggatggaagttgtaaaacaaaaaccccagcgtgctggcaataacgactaatgagagtgacagaatgagcacttttccgccggatagcgccatgacagcaatcgttgacaggccgataacagaaagaccggcagcaaggccatccaatccatcaatcaggttaattgcgttcgtgatgccgacaatccataataccgtcagcggataagccatccatcctaactcaaatcgttctgttaaaaaaggtactgagaaaaagtccatttttaagccagtgcttacaatcataatggctacacctaattgaatcaaaaacttaacttttgcacttaattgatatttatcgtcaagaatacctaacacaataatgatgaatgctccgactgtaattgccgtcatccttgtttctgtgtaaataccggatgcaagcacgcctgcaaccaccccgataaatatggccagcccgcccatgcggggcatgattttgtcatgtacttttcgattgctgggctggtcaactgcacctattttaatcgcaatcctttttacgattggggttatgattaaaactgtcagcagcgagacaataaacgcaacaacaatgcgaatcatgcgttcgtcaagcataaagaagtctcctttggaattaaatgaagtctttatttatatagagaaccgttccttccattataccttctccttagttattataacaagcttcatcaaaaagaaacacgtataatcaaaaaacgcgcatcccaatttataggactacgcatgtttttgaatccctgtatacttcataatttgtctaaataagcaattccaatcttgtgtgcgagcgatgtttcggcgcatttctttataggtttcgtctccgttttgtccgagaactttttcacaagctgctataaaatcaattggatgatcaccttctacatattcgtatacatacggcttttgcatttttgaggttgacggaagattagtgcctacaacaggttttcctgccgctaaaaattcaaatagtttcagcggaaacacagcttgattatacggtgattgtttatatggcatgatgccaatgtcgataagctccatataatgaggcacttcttttggatctgccggaccggtccatatgacatttggaagcctcagcagctcttgaaacgaaacgtcaccattggtggcatccgggccaacccataaaaatgtccaatcaggcttttgcagggcggcggctttaatcattttaaaatcgagcttcggtttaatcccgccaataaaacctaacactgttccttctctcccctgcagtatactgcgatcgggagcttgtttatttgcagaaaacagctcatactccacaccgttttccacagtatgaaccttttctcgtcctgcagtcagttttttgtctacttccttgtgaagataatctgatgaacaggttattgaatctgctcgttgtataattctcagctctgccgatttaatgacttttcgccggaattcagacagcagatttgatcggccgctgatcggcgccgcccataagtcactgcagtcataaatgacctgatcccaaggatacagcgaagacagcagcgggaatccgggaaacgtgtaccataaacagcaacgttcaccgtttgcagaagcaggtgtaagctcatcgagtaatggggagagcttatgtctgtaaaagacatctgtatatcgtccgaaacgaaacatttttttctgcagcaggtctttgacaacgaattgcctgatgccagaatggacttcttgaaattctttaccttgggcacgcggagccggacatacccaaataacttccttcgtttcctcctgagcagctaaaaattctgccagccggtgccttctgtatctcaattggtcttttccccattcagcagtggcaacgatgacatgaatgattgcttcttttgtttccaccttcatcaccttttctctctgtttgcggctataatctttttttcaccgcgttttttgcatattgaacaaaacaccatgttgctttcataaaatgaagccgttcgatctccctgtagacaaaccacgtttttttcgcagccttccatttgttgctggaaattgagttattgacaagccgatattcagccaggcattcattcattccataggcaataaatcctttttttaaaagagacagccatgtggctaagtcctgtctcgttctgatattcggcatttggatctgtcccgtttgctccctgtcaatcatcaccgtcaagcagccgataattgtatttttcagggcgtcatcgtacgtcaggctttccggcgcatgaataaatttatcgagtggggtcccgtcctgcgccattaagctgtagcccgtgaaagaaaacgcacaggagcgctccatcataaactcaagctgcttttccagtttgtcttttttccatttgtcatcactgtccaaaaatgctacgtagcgcccttgagcgcgttccaacgctttgttgcgagcaaccgcagctccggagttctcttccaaatacaccacatgaattctttcgtctattttttcatactgctgtaaaatgtcgcgggtcccatccgttgagcaatcatccacgataatcatttcccaatgaggatggctctgatctaataccgaatgaaccgtgtcttcaatatagtcacgcgcattataggaaggtgtaatgacagatacgagaggtttccaattggtcatgatcacatctccatcgtatgattttaaaaggattccctgaaaaattcaggaatgacaacgaacataaaggcaatcgtaaggccaatcataacgccgagaactgctttctttttcggagacattccgccgcctgctgtctcacttacggtttcggaatcagtaacacttgccgctttcaggttaagctgtgtgtttttgagctcatacaaaaatctctctttatccactttggaatcctcgcttaccgactcgccttcaagcgcgtctatgctgctgcggatgacggcttctctttctgcatacagcttttgatcgtttttgaggaaggtggaggaaatggcttttaagacagattccgttttatccttatcctcgtcgctatagcttaaagtcagtaacgatttggattccgttttgattgtaagcttctctttgatctctgctacatcttcatccttttcatcaggaagcgcctccttcaaaaaggagtcgctctttaatagaagcggaatctcttctgtgctgttataaaccggatgatcatagctccccacagccaaagtatcttcagctgtatagctcttttgatcagcgatctgtgacggcaggatataccccgccgcacctaatataattggcaccgctatgatccaaatgatatttttttttatgcgacgggctattcttatcaatatatcgttcatataagtctccctgctttttgtagtctgttttatctgtacatcggctcaggcatttgtctggatcgccttaacacattcacggccgcgatgacgagcgccataaacacccaatggaaaaataaatttgaaacagagcttgggctgatacttgataccaggaaactgaccatagcggtaataagtccttctgtgatcagttttgactgattttctaattttctttcataaaacttgtaaagcacccatatgaggtaggcataaacggacagatatcccagcatgatgaacaagccaaaattagcaagaatttcaacaagccagttatgcacctctgccacattgtcagtatcatatacagcataatgctcaagataataggatacatttcctgccccgactccgaatccgtatgaatcaaggaaaaaatgccaagcgtttttcagcagatttgcccgagccacatttgatggaagcctgtcatgaaatgaatgcagcgtctgcggggccagaaacagctcccaaaactttgaatagattttgctggcgaaaagaactgcgaaaagagcaattcccgccgccgacagccatatagccattctctttaaaacaggcggcaatacaatgaagatgtagacagcaatacctgcaaaaatgcccagaaggctggctcttgaaccagtggcaaaaattaaatacaacgcacagagcgagagcacaaggccaattgccttgatgtatccattcttaatgtttttcatcatcgtgatgtaaaaaaagaagctgatggataaaaaggtcgcaaagtcattttgattaaaaaagaccgatgtcggataatgctgcttgtactccggtccgctgtacaatgtggaactcgcaagatgatggtgggtgatatgattgtaaaaaccaatgatcatcagaaataccgtcatcaccagccaaatggcataaacaatcatcagccgctccattttttgcacgtacatgacaataagataaatgaagaagattcccattgccaataaggctaaatacttgaggccaactgttaccgacttggcccacagcagagaaacaaggccatatataaaccaaaaggcgaaaaagagtaaaatcccttttacttgcagcccatgccatctttcaatatgggttcgattccgaaccatgccgaaaatatgaaggcaacccgctgcaatgagcagaagccggtaaaggaacaaactgaaaaatccaagatgaatagcgaaaaatgcattatttaaaaaagtgcaggcgatcaaaatatagattacagccataaagagccgttcttttgttgtaaatgcggttgcaagcgtcagtaaaaacaggccaattgccaacaccgcaagcacaacagccatctgcatgaaacctatatctttatggatggctcccagcaataggacgactccaaatatagcagcggccagtaacgctagcgtatggaccgctgatcgtttgatactcacatgtttaacccctttcctgatgtttcaggagccggcggccgagcctagcagccggcagcttcaaccaagtaacactttttctttttataaattgacgcttcccaagtctttagccaattcttcaagcggcaagcccggaaaatacttgtcagagggttccgttccccgaacagcgggacggccgatagagtgataaatgtatccggctgcctgcatctcttcaagtgaaaataaatttctgccgtcgatgatgactggctgttttaagaggttttttacttttacaagctccatttcttttacttccggccaatccgttaaaatcaggcatgcatcagtgtcttcaatcgcagcatacacatctgtgtaatactcgacctgttcgccaaggatcgctgaagcttcaggaatagcaatcggatcgtatgcttttacatgggcgcccagctgctgcagcattgggataatatcaagcgctggagcggatctcacatcgttcgtattcggtttgaaggctaatcccaggactgaaatggttctccctttgacgcttcccataacagtcaaaagtttatctacaatatgaacacgctgcttttcgttcgtttcaatgacagcttcgatgagcttgaatggatagcctgccgattttgcgatttgaagcagcgcggttgtatcctttggaaaacatgaaccgccgaatccaatacccgctttaaggaactttctgccgatacggctgtcaagaccaacaccatcagcaacttttgaaacgtctgcgccaactcgctcacaaatgtttgcgatatcgttgataaaggaaatctttgtcgccagaaatgcattcgcggcgtatttaatcatttctgcactttctaggtttgttttaatgacaggagcatggaatggctgatgaagttcctcaatgatggcagcggctttatgacttgttgaaccaatcacggcacgctccatattcatcgtgtcatgaatcgctgacccttcccgaaggaattcagggttagatacaacatcaaatgagtatctcccctttgaggctttttgaacgatagattgcaccagtttccctgttccaaccgggactgtgcttttatttacgatcactttgtagccgttaagatgctcaccgattgttttcgccgccgctttgacgtacgttaaatcagcttcacctgttttggacataggcgttccgactgcaatataaataatatctgaggcccgaatggcggacgggatatcgttcgtaaaggtcaggcgctgatccagcacatttttttcaactaagtctgcaagccctggttcatagattgggattaccccatttttcagacttctgatttttgattcatcgatatcacagcaaacaactttattgccgatctccgcaaagcaagtgcctgatacgagtcctacataacctgttccaatgacagctatttttttcacagcgctcatccctctcctgtaaaatgatcttcctatttatattggtcgcagtttcttacgattaaacggacgttttcgtgaccgtctgatactgatgatgcaaggccttggcgttttttcctgcgtcaaattgagcctgcacggtttcatacaagtcatctgctacttccggcttccatatttgctcatgttcgtaccgagtgatcgcttctgccaaggcttgagcggatttcggtttaatcagcagatgttggtgctttccgaacaaagacgacactccgccaacatccgtacagataacaggaacccttagcgccagcgcctcaatcacaacagtcggcatcccctcactgtaagaaggaagcacgaatagatctgccgcaagtaaatagtctcttacatgatgattcggcacttggcctgtgacgatatgccccttctgcgtcagcgtcgattttgcgggaccatccccgacaaagactgcctgaggtgggtcctgcagcgattcgatcgcttcagacagttcaaaaatgcctttctctctgaccagccggccgacatagacagccagacgctgatcaagcgggagtccgagtctttctctgatttcctctttcgtctcctcattctcctgaaaacggctgagctgtatgccaattggcaaaaccgagctgtcaaagcccgaaagctttttggcttcttcctgaagcttgtggctgactgctaaaacaactgacgcagaacctacggcacgcttgaaggctttaaacgctcctttgctgtaatgcggatagacattcacatcactgccatgcaaggtcaggacataaggaatttgcgctgactctgacacgactgccgcagccccgcccgatggcatggcaaaatgagcatggatcagatccggatataggccgcgctgtttcatggtttttaaaacggctgatgcgattctccgatgaggctgcgcccacttcagctggccgggaactgcccgatagaaaggccggtaaaccggtatcccctttctaacctcatactccggtctggcatccttttttcgatatgtctttttcagcatgcggacaggcgctgaatgaaaaggccgtgggcatatcacagtgatatcaagcccgagtttttgcagctcttgcacctgtgtctcatgaaacacaccctctccgggtttcatactgctcggatatacgcttgtgatccacaaaatcttcatgacaaacgtccttttcttagtagtttgcttttcgtttgagggtacgcttttaccaaaagaaagagatagcacagcgccccggccgcaactgaaatggccagccgcatttctgcctgcatactgaagtgttcggtactgaggcttacaccaaacgcgatgatgcccatcgccgcagtaatcagaaatggcttcataatcgactggaaataagctgaaaggttaagcttgatgacatatgccaaaagccagcgcccaatcaggaaattaacaacgctgataatggcatacacccatgcgactgtcagcaggcttcccgtctgtacagctgcaaacagtgataatccgtacagcagcagcacgccggaatcccaataaaacgctaagtcagctcttcctttagccagcagcacagatccatttggattcataagcactcttagtattccgacaatcgccagaacatttaggatcggaacagcagcaagccacttttctccgaaaaccgctgtgataaaggcgtctgacacagacacgagcccgattaaaagcggaaacgagacaagcgccagcatttttgtcatattcagaaagccttctctgatcacgctgttttcatatttgttttttgcgaaaacagggaatgccacccgtgtgacaatcggattgatcttcaaaaccggaatggtgacaatctgataagcgaggttataaatccccaatgcttcagcaccaataaaccggccgatcaaaatcatatcgatatttgctcccagcctgttcacaagacgggatgaaagctgaaatgctccaaaagaaaagaaatccttcatgcctctcaaatcaaaaacaaaagcaggatgccaattttttcggtatactgcccaatataaaatccctttactggactgcagcaggacttgagaaatcacgtacgccaaaatcgcatccatcataaaaaccgctatcgctaaatatccgaatgacaatacatttgaaaaaatctctattttgcttaacgtattaaaatgcagctgcttttgcagcatatactgatattgctgtccaattggcgcgatcaaaaacataatcgccagaatccgaactagaaacaccagctcttctctttgataaaatcccgcaatgacaggactgctcacatataaaagaacaaacagcaaaacgcccgtcataatgttaagccaatacaatgttgacagctggcgctccgtcgcgtcgtctctctgaattaatgctgctccaaaacccatatcgagcacaatctgggcgaaaactgtaaccgttgtgatcatgccgacaagcccaaattctgttaaggtcatcatatttccaagcagggcaaactgaacaatttgtatgattgtaatacacatggttgaaatacttgtccactttgcaccgctcatgatttgttttgtaatacttggcatcatattccctacttctttttaagctcagattgatggtgaataatggcattccgttttatcttgcaccatcacccgtccaaactactttacaagtttttaacataatttttaattctaaagtgaaagtcagattgcgaatgtaatataaatcaaatatcagcttttccttcggcgtcatatcgtaaccgccgttcacttgagcccagccgctcaatcccggtttaacagccagacgctgtgtaaagcctggaatctcattctggaatttttccgtaaatacgggccgttccggacgagggccaatcatactcatatcgcctttcagcacattaaacagctgaggaagctcgtcaattctcgttcttctgataaaagctccgatccttgtcactcgcggatcttgcttctgtgcccaaaccgccccagacttctcggcatctattttcatggaacgaagcttataaagcttaaatggtttcccgcctttccctacgcgttcctgcgtataaatggcaggtcccggcgtctccaaacaaatcaaaattgaaaataccgcaatcattggcagcgcaatcgccaacccaatgagcgcaaaccaaatatccattacgcgctttattgccaaataacgagccgtcttttcagataatgtaaaagaatgtatttgctgaactgagaattcacgactcacattcatgcttttctctgcactcactgacacacacctcacgatttgtttgggatgttatgatgacctatgccagtcagtttagcagacggatgttaattggatgtaaatggtatgttaagaagtgtgaattacgtgttttttctgataaatgttgttaatactcttttactattttatatacaagtcctatttgttttaatcatttcatataaaaaagagacaaatctgtgattagatttgtctctttcgattatctgtaataagatactgtgccgtcatgaatagcttgtgcagctttatctttataaaccgcttgcttcaatttacttgcatctgatgcattagtgataaaggcagtttcaactaaaacactcggcattttagaatatttaataacatagaaagcggctgtttttactccccggtctctcgttccaagattagccgctaactttggttgaatttgttcagccagtctcttgctatttgcagcttgatatgttgtatcgtagtacgtctcacttccatttggtgatgagctatcattagcatttgcatgtatactgataaataaatctgcttgtgcagaagctgctttatttactctctcctgtaaagaataaaaagtatcattagatcttgacagtactggaagagcacctgaagtatttagctttgtattgactcttttcgctatatcaaggttgacttctttctcaaggagtccattgccgattgctcctgaatcttgatcaccgtgacccggatcaataaagattgtttcacctacaactggattctttagctgattagcaaccttggtgcttacggcaggagtgtttccgataatcgtaaagtttgacatgtttttacttccaataattttacgggctcctgtagataaattttcaccatttgtaaggataagagattgcttcttcttagctgccagtgtagctcctgcaatagagtcagggtagctgaatccattgcttacatatacgatgcttgttgataaattaagtttttgtacgatatttgcagcaagctcatatctgtttgaaccactaattcttgtaggagaaggtaacttgttgtataccgtattgctgatacttccagtgcctcctacaacaacggtactcgaaattcccttatcttttatcacagacgttgtcgcactatttatagatgttttatttgtaaaaagaattggatacccgtttttcgctgcataaggaatgacggccggagcgtctgcatataagaagccattcaaaataacagcttttgaagtcgcacccatcgcttttgccacccgtgcagccgtatcataacggttgcttcctgcaattcgtttaatacttatccccaaacttttaatctggttagcagtgttagatgaaacagcaggtgttccgcctacaataattacatttttagtctgcatctctttcaatcttgttttcgtttcatatgaaagcttatcagaattagtgtaaagcaatggcgcattcttctggtaagcaaggggtgctgctgaaatagcatctgcataggaactcccaccaacaattacagctgtacttgctgttgaatacatttgctttgatatttgtacagcagtgccgtatctattgcttcccccgactcttttcactgaattatcggccaaagctgttggcacaaaaagtatgagccccagaaaacacattgttaggacttttatataagaacgcaattgatttcctccttaagtggcgttatatcctaaaataatcaataacttgtcagagttgtacctggatagtaaaatttcaaaattgaactatatgaatctccagcttctgctcttgcttttgctccatattgactcattccgatcccgtgaccatatcctttaccgctgattgtgtactttgaagtatctttttttacagtcacataagtacttttaaatacagtcgctccaatcattgttcttaactcacttgttggtacactaatggttgtaattttgctcaagttataggagccagtactgcttttaacaaaatacttcactttcatcgatgctgtttttgcacgctgcccttgtgtcgttccactaaagcttaaatcgtcaatacttgcaattttgacagaatcagcgcttgtttctttatttttcaagatccagttcttaactccggaaagtcttgcagaatcagtttcagtcgctgaagaccaccaagaagaaggcttcgttaagtccaaagatttcgtatctagctgttgttttgacaaagtaagcgtccagcctatttgaggatcctttgtatctttttttgcaatcaagtaaggtacacttgatgaccacacttcattactagcttctgtgtaaccaccattactggaagaataagctgcagttataagagatccattatatttcagaactttccccttcgtttgctctaccgctttattggtattcgaattccaactgtagccaccataaacttgaaaagcggttgtatcaggtacagtagttcctgtttttgttattgagtaggttcttgcagcgacagtctgtgctttaagagcctcaagtgaccagctagcaggcatttcattcggaattactccttttaagtaatcctcaaatggaatattctcatttaccggtcggatatatttagtagactcaatagagaaattaaccgtgccaagatactgctttccatcaagactaattctgtttgaagtagaatagttttctggtttaattcttagggagtttccgtaagttttgatgttttcaaggtttaattttccgctgttgatttttagattataggtgctaccgtcagctaaataaaattcatcagcaagtgaattctcaacttcagcagaaattgaactggtacttccaataaagtcgtatgcatatgtggctttatctttcgttatacttttagccgcagccggaacgctatcttgtttaataaataaaatttggctgtttttcttcgaggcaagcgaagcgcctatcagtacgtctgcatattttgtcccgttcgtcattacgactttatcagccttcaactttagttgcttaattatatttgccgtaagttcatatctggttgatccaggaatcctttgcacagttgaagtttttttaatttggttttctacactatcactgacgctaaatgaactgcctataatgatgacttgttttggcaaattataatccggaagcttgtctttctctgtaagcaaaatagggtatccgtgtgctgctgcatatggagcaatggctaaagcgtcttgaaatactcttccggttacaacgatcgctttatcatagctgcccatttgctttgcaatattttctgataagacatatctattttttccgcttatccttttcacagcgccatatgatttcagcttgttttctacatcttttgaaatgcttcgcgctcccccaatgattaaaatattatcagggttaaacttagcaatttgtctttcagtagtttttgttaacgtgtcaggctgagtaaataaaactggtgcgttcagttttttcgccaatggaataacaggcaatgcatcaataaaaatatctcggttcaccaatatcactgtattaggatttttccactggctgttggatgcaagagtcgcagtttcgtatcgtgaagcgcctgcaaaacgatccgtaacagcaacattatctccagttactttataaaatcctgttggcgatagactgatgctagatttatttccaatataatttgacaatttaactgagatgtttgagtctgctgcaaaagaaactgatggaatcaataataagattgcagcaagtgaacacactatcaatcgtttgcaagatttcaaaatttcaggttcctccctatatcttagttggcacgttcaatatcttttaacagaagctgaccctcatcatttttttcatatgtaatcgtgaccttatctccactgttaaacttatcaagatcacttgtcgattcttcagtgatatcaagactaaccggctcattatctactgttacttctattgtatgagtatcagctaaccctacataagtaccttcttttgtttcaatgttactgtctggcgatacatcttcaccttgactcttttgactattaaccccgcaacccgaaagaagcaatataaagaacagtaaagcaataaattttttcatttttttcacctcattatattttatcgtcaacctattttatattttaaagaaaaattaagaaacaatgaaacttttttttataaaaaacgactattttaggatttcattcttgtattaaatagagttgtatttattggaaatttaactcataatgaaagtaatttaacagacgaggtgcaaaggatgagaaacgaacgcagaaaaaagaaaaaaactttattactgacaattttaacgataatcggacttcttgtactcggaactggcggctatgcatactacttatggcataaagcagcttcaaccgtggcaagtattcatgaaagcattgataaatctaaaaagagggataaagaggtcagtatcaataaaaaagatcctttttccgtcttaatcatgggtgtggatgaacgcgacggcgataagggccgtgccgatacgctcatttatatgaccgttaacccaaaaacgaatacaaccgacatggtcagcattccgcgtgacacgtatacaaaaattatcggaaaaggcacaatggataaaatcaaccattcatacgctttcggcggcacgcagatgacggtagacactgttgagaacttcctcgatgtcccggttgattattttgtgaaagtgaacatggaaagctttagagacgttgttgatacacttggcggcattacagttaacagcacattcgcgttcagttatgacggttattcgttcggcaaaggagaaatcacgctgaacggaaaagaagcgctcgcttatacccggatgagaaaagaagatccgagaggcgacttcggacgccaggaccgccagcgccaagtcatccaaggtattattaataaaggcgctaatatttcttccatcacgaaattcggagatatgtttaaagttgttgaagataatgtgaaaacgaacttgaccttcgataacatgtgggatatccagtccgattacaaaggtgcgcgaaaacatattaaacagcacgaactaaaaggtacaggcacgaaaatcaatggaatttactactaccaagctgatgaaagcgccctttccgatattacaaaagagctgaaggacagcctcgaaaagtaaaacaaaaagaagcttcgcacaatgtgcaaagcttcttttttatttgcctgtaaatgaatccggttgttctttccggtacccgtaatgaaacagcaattcttccacaatccggcgggaagcctctccatctccatacggattagaagcctgggacattttcttgtactcatcaggatcagttaacagctgttttgccagctgataaatgttttcctcatccgtccctgcaagtttcaacgttcccgcttccactccttcaggccgttccgtcgtatcacgcagaacaagaaccggtttcccgagagatggggcttcctcctgcacgccgcccgaatctgtcaatataaaatgcgatttcgctgcaaagttatggaaatcaatcacctctaaaggttcaatcagatgcactctgtcagaatcaccaaaatgcttctgagccgcttcccggacaacaggattcaggtgcacagggtaaacgacttgtacatcttcaaattcctctacaattctgcggatggccttgaacatgttttccattggctcacccaaattttcccggcggtgagcggtcaagagaatcattttatcctcacccacctgatcgagaacaggatgtgagtaaccatccctaaccgttgtgttgagtgcgtcaatcgctgtattgcccgttacaaaaatagagtcggcctttttgttttcttttaataaattgtctttcgcctggcctgtcggagcaaaatgcaaatcagcaatcgcccctgtcatctgtcgattgagctcttccggaaacggggaatacttattccctgtacggagccccgcctccacatgaccgacagcaatttgatggtaaaaagcggctaggcttccggcaaacgtcgtcgtcgtatcaccatggacaagcacaatatcgggtttgatatctttaaacaactcatccaatcttacaagtgcgttagacgtaatctctgccagtgtctgccgctccttcataatgttcaaatcgaagtcaggcttgatgtgaaacgcatctaacacctgatcgagcatctgtctgtgctgtgcagttaccgttacataggaatctatttcaggatattttttcaattcaagcacaagcggtgccatcttgatcgcttcaggcctggtcccgaaaacggtcatcacttttagttttttcatatttgtcacctggttttctgctatagtaaataaattcatactacatattctacatgaaaatgcatcattttaaatcatttcattcttgattcaaataaaatgatataagttttaatattaaggataaagcttgtttaaaaatggtttatccgatatcataaaaatgtgtaaaaacatattgaaaagggtaaatagagaatagtttaaccataaattttttcgatcataaggaaggtgccttttaaatgaaaaaagtacgtaaagccataatccctgccgcaggtctcggaacgagattcttgccggctacgaaagcaatgccgaaagaaatgcttcctatcgttgataaacctaccattcaatacataattgaagaagctgttgaagccggtattgaagatattattatcgtaacaggaaaaagcaagcgtgcgattgaggatcattttgattactctcctgagcttgaaagaaacctagaagaaaaaggaaaaactgagctgcttgaaaaagtgaaaaaggcttctaacctggctgacattcactatatccgccaaaaagaacctaaaggtctcggacatgctgtctggtgcgcgcgcaactttatcggcgatgagccgtttgcggtactgcttggagacgatattgttcaggctgaaacaccagggttgcgccaattaatggatgaatatgaaaaaacactttcttctattatcggtgttcagcaggtgcctgaagaagaaacacaccgctacggcattattgacccgctgacaagtgaaggccgccgttatcaggtgaaaaacttcgttgaaaaaccgcctaaaggcacagcaccttctaatcttgccatcttaggccgttacgtattcacgcctgagattttcatgtatttagaggagcagcaggttggcgccggcggagaaattcagctcacagacgccattcaaaagctgaatgaaattcaaagagtgtttgcttacgattttgaaggcaagcgttatgatgttggtgaaaagctcggctttatcacaacaactctagaatttgcgatgcaggataaagagcttcgcgatcagctcgttccatttatggaaggtttactaaacaaagaagaaatctaaacataaaggctattggacattcatccaatagcctttttttatttcaacatcaaagtcaatgtatgctcttcattatcaactgcgaagacctgatcaacggcctgccgcaaaaattaataatcccagacaaacacactgattgtagagttaaacaaactaaatgaaaacataaatacaaacatgcagattaaatagtaaatatcttgtattcaatgcaagctaagtaaacaccacttgctaaaagaacaatgactaaacaaccagcattacaaaataattaaataaatttgaagcaattacaacagaaggcagtgaactgtcggaaagttcattttggctaccatattaatcccttttaatttaagagccaggccctcaaattcctctattcggtcggcatgtccaaatatatccatccatcatttttatgatttgcagaaatgttcattatctcaattttcacgtttaacccttcgtcgaagagttaactctatagacttatttttttaaactggtcaaaaaaatcagtgtaataatccattgtataatgcacataaaatttgccccatggatggttttcaaaggaattatagcttttatttttaaataaatctatcgcctcgatatcattgaagctatctaatacatatgcgtcaaatttattccaaatcttattataataatcaacatcaattactttgatgttccctccatttataagcaattttttctgatcttctttatcaaaaaagtgatgaacgtttcttgcactatttaagataattttggttttagggcaatttaatctgacgtagttatagaaaagattaaatttctgtttccatagtgcaaaataattttcaaaatgatcttctatattaaaactttgttttttattttgaattgtaaatttataataattcgttttagggagagtccatctgttatttgtaacaaactggttatctgaaatttctacgtagccaaaatgcacatctgcgaaaaagtccaaaatcaaaatgtctggctgaacagatttaatctcggttagaaagctattctcaaaatccgtctttaaagtgtttttttcatgattagacatgttctcattatcaataacaatgtagttaggtttactcattgttgaaataatggacgattggttttgggtcaatacacaatcaaaaaaatttttataatcagcattaaattgagagttaaagttatcacgtgtaacacaactaccataaacagctacttttttcatttctttattccctctttaatattagttcctagactaataatttgttgataaacacgtttacagttttctttatccgtatacttataaaattgatttactctatcaatatatttggcatccattatacaatcgttttccatacaatttatcagcttatcaactaaagcatctttatcagcaattacttctccaaaccccattgaattgtaatcaaaataccctttttccaagtgatttttttcgtattggaagtaaaaaacaggttttttaagataagcaaagtcaaatgcaacggatgaataatctgtaactaaaatcgcactattattgaaatgatctcgataactttcattaatgtccgcaatcctcactgaactatttttgttgaaatctttcaactgctgaacaatatttggatgcgggaagaatacgatctcgtatcctttttcattagcctcattaatgagtttagcatcatttaataaattattaagttcattaaaataaactgagtttttaaagagtggtgagtaatctcttttccctgtttgcggatttatttttcctactaaatgatttctccatgttggcataattaatatctttttatgattatgattaacaagcttatcaaatctaggaaatccagttagaattacttctctttttgaataattataatgaccattaattatagactcatactcaggttgagcggctgtgataaatagtctaatatttttcttatacttattaagccatcccgaaatatcatctttcgtaattccatgttgaagaaaaacaaagttaaatttaaataagtccttataatatttcctcatattcacaaacgggttgactacataatcatctgcatgtgaagagataatttcatcggcaagtaaatgtaaaaatttgtgcttaggtgacccgtatgcaacaactggtcctatttttttcagcctgttataatctggactatctttactgataataaaatattttttgatgccgtcattctgctgcattgcatattcaaataatgcttcagcattatcatctgccttgttgattctatccataaaaagccatactcttttatttttctttattttatagaggtgttccataatctttcttacatttgatgctttctcagcacctattttattaaaggtcttaaaacgtctttgagcccgcttttcttttgctctaataatctgatttttatcttttagaactactaaattattaagtttatgatcgaaataaatccctataccatttttggtatagaaatcaactatatgtttatccagcgggaataatcgtccaaagttaatttttacttttattagttttccatttgatgaaatcatcatttcaatattcgagttatttgcaagctcaccaactgggatatcaaccttaaagcccaggtactctttaactggcttatttaagcaatataagttgtgtactgttctatcaattttttcggcatgatatatcttgtcattgacacatgctttcacttctaattctgcggcatcaaataatgaaccaaaattaccttcaagggttaaaatccccttttcaatgcttaatagctccattgttatagcttcatatctcatagaattaattaatttctctttaaaatataaattcacattacgattcaaaaagatctttttaaatacattttttttatttcgatatttcaatttgattaaaaaatattttctgtgcaagtttagagatttttgttcaaagattatgtcgtcatctataaatgcaagtattctttctagcaagtcaaaaaactcttcaacttccttatccgtcaaaacatcagttctgtcttctatatttattctccactgcaagtcataggcaatcatatactgaatgtatcttggaacgtatcctaaagttgtaatactatgattaattaattctcgagagaaattcttcaaataatccacataccattttttatcatttttacctgtttgagttgcagatgacgcatcttctcttcgtcgataattatattgtccttctgacacaataccgtatacttggcgcttcattataattttagtcagccattcactatcttcagcgtaggccatatcttcattaaaaaagtgatttttaacagcttcttttttcacgaatgaacttggtgctgataattgaattcctgtatgttctttcaagatatgaactagcctagttttatcaaatttataatttaataagtgtggaccacttgttttaccaaacatcatcattggaatagaaactacatcgactttagaataattcttttcaaaaaaatcatatacttttaaaagggttgaaggggacaatgtatcatcaggatctaagaaattaatatatttacctttggcatattttaaaccctcattacgcgcactacttgctccgccattctccttatcgataaagactatattttctggatacgcttctttatactttaagcaaatttcccctgatgcatcaacacttccatcgttgactaaaatcaactgtatatgatgctcaaaatcaagtgcctgatcaattatgcttgttattgcttcatctaaaaattcttcaacattgtaaattgccattataatagaaaagaaaaaattcttttgttccaagtttttcaatctcctttaatttatttctttttactcaagggtattagattctaatcaacttttgaaatattctagttaaaacattaactttttgaagatcaattaaattgttgtctttttcaacaataaacctaaaaaaagtaactcctatcggaagttttaattgatatgaagaatattttctatccctaactgtggttccccaaataactatgttcttatgttcttgcttgtttattaattttgcttttctcaattttcttccataagagatataaacactatttttatcgttaatcacagactcttcattactcaaacttaccattagctcaattgaaaatttattgactttccatgaagtaataacgattttttcattttctagtttccctaattgaataagtctgttgacaggataaccccatcgtttaaatgaaatgagatactcttttaaatatgttttcatgttttgttttacaattaaattctcatctatatatttcaaaacgtgaaataattccttaaaaaactcactctgttctatcttatttagcacttcataaaccttgttattgtttttttgaaaaataaataattttaaatgattaagaattaaacattgaacataaggtataacttcgctgtactcttctaatgatcttttaaccatttcaccatatccatttgtaagtaaaaaagtatacctgttttttttagaccacgaagtgtctactagagaatcctcactttttctttttctatagaaatatttagcggcaggaataaggccatatttttgttctttaattaaaaacgtattaataaataaaacatcttcccaaaaatccattttttcattaaaagcaagaccaagacgttctattgctttttttcgaaaaaatgttccacctatgtgataatgaatagcagtgtaattatcagttatgtttacaatgctttcaccacttttaaatctataattaagtgagtgttctccatttttattatcgaagaaaaatagcggcagtaccgctaaattaatatcggtatgcttttcaaaaaactttaatacctcagcaatagcatttagtgagactttgtcatcagaatctataaaccctatatatttactattatcacaaacttttaatccattatttcttgccatactgacattcggttcatcttgataaataattttaatattattcggatatgcagttgcgtattgttcacatatgttttttgaattatctatgctattattttcaatcaatattatttctatgtttttttcaaaattaattgtctgatcaataatactgtcaatggcctctcttatatataatcccgaattataaacaggcattacaattgaaaacaacatctcaagtgctcctttaaaataataagtttttatccgagtagtcttccacaactttttttgaatgaatcatcttttccaactaacaaaattggtcataaaatgaagtaatgttttcatcctgtttatagtctcttgttttatgtatggattcaatttacttttatgttgttttaaaaagaggtcccggagcacacttttcaaaatcataataaaaatctcttagtttatctctataaaatttaatatcgggaacataacgcctttttaaaccgacataataagcaaatactgaagaatagtctgttattaatatatctgatattaagtataattctctaatatcattatgatcagaaaaatcataagcaaaacccatgtattcagttaagttaatattttcagatacaagatagtggacccttaaaataacaatatattcattacttaattggtctttaagactttctaaatccaacaccatattaaatttatatttacctttaacataaaatgagttatctctttttattttcagcattccttcattgctattttttttatataaaaaatcgttcctcggatagccctattcaataaacgtctttttaaactgaaacgcatttttaaaaattttcgtagagtaagcattaagggaaatgagataaccgcatttactgacttctataagaaagtttcttttatattattcagtcttcatgccgggcatatgtactttatccatgtcatttgcatttaggggagttccgtgcccagtgtgcacatatgtagtgtttctcggttttagaacctatagcggcaagtggctgtttgttatccaatattttgatgtagccaaatacaacagccatttgagagagattttttcaaataattctcatctgaatcatcaaataaatctttgtctcttttatctacactccaaaatatccatattcatatttattcttattttcctcaagatactcgaaaattgctcttggattacagctgaattgtttgcctgaatagctttcgaagatgagtaatctttcgtttctgggcaaaagcccaattattctaaaaataattgagtatacactgaccaatagtcttctatatttcattaaaatctttgatttcattttagactctttaaatatcaaagaattaaatacttatctcagcaaacaagaaaaaaagaagcaactgaatgattcaagcctcttttagttagtgcgtctataaactagccatgtgttttttgatttggtagttgaaatggcttttgttcttgaaaggtaaactttccagcagcttcatatgtccgtagtgaaataaatcaaatgttccgtacgttatcactttcttcatgagataacatcaccttccaactgagagtaccagaaaaaaaccaaaaactttaacaggttgtttatcatttcgacatattttttacgtaccattaataatgaacaataatagcataagttcctataaaagttaagactctttaaaaatgttaatcaccagcatttttttgtatcaccgttgtattgttgtatattttttgcaggtccaatatcttatctataccctttataacgagttttctttttcggaaaaatcgattcttttgtcgcgtttttaagtgaaacgttttctttctgcaacaccatttattttgtacgcccttctcatattaatacatcgtcaaaacatgaaggaattgtaatacgaatgttaaaagttcctaaagatttttgcggtaagatagagtaaaacacacttgtttttatagacatatagatgaaagaaaggttgatacgatacaaacgaaacctattaattaattagataaagaaaaaaccgagcttcttgagaaagtgaaaaaagcttctaatctggccgacattcactatatcctccaaaaagaacctaaaggtctcggacatgctgtctggttcgcgcccaactttatcggcgatgagccgttcgcagtcctgcttggagacgatattattcaggctgaaacaccagggttgcgccaattaatggatgaatatgaaaaaacactttcttctattatcggtgttcagcaggtgcctgaagaagaaacacaccgctacggcattattgacccgctgacaagtgaaggccgccgttatcaggtgaaaaacttcattgaaaaaccgcctaaagacacagcaccttctaatcttgccatcttaggccgttacgtattcacgcctgagattttcatgtatttagaggagcagcaggttggcgccggcggagaaattcagcttacagacgccattcaaaaactgaatgaaattcaaagagtgtttgcttacgattttgaaggcaagcgttatgatgttggtgaaaagctcggcttcatcacaacaactcttgaatttgcgatgcaggataaagagcttcgcgatcagctcgttccatttatggaaggtttactaaacaaagaagaaatctaaacaaaaaggctattggacattcatccaatagcctttttttatttcaacatcaaagtcagtgtatgctcttcattatcaactgcaaaaacctgatcatctgtattcacaagaaaacgcttcttgctgctgtcatacaatacatcgctatcacttaaggatagtgacgccgggttgataggagaaatgttatgaaaaataagctctgttgctttatcattctccagtacataactgattttttcataatcaaaattcagcgtttttctgccgtcagccttatttccttcagtataaccattcaatttcgattgaatgctggtgctgctgtctcctaggaatttcagaaagtattcataggaagatgctgcgttttgcgagacataagacgtaaatgcagtggcatgcaattcagcgtgtttcatgttagttgcaacagcgctctgtttcacataataagagtgcccgtcaaactttattttcgctgcttgtttgccttttgcagctaccgttacttttgtaccgaatggcagtgtaacgtcagccttctgtttcaaaccctgatccttataagcagccgctttttcatttgctataaacccttgcttattgattgcagttaagcgttcctctgacttgccctttgcatcgccatgatggttcttcacttcattttgcggaatagcgccaaacgaagcaattgtacgaagcggggcattaaagaacatcgttcccgccatgaagacagtcagaatagacaaaatagcaatttgaatggcattggccagtgatttcggctttttcttctttttgcggaaacgggcaaacgcttcaggatcttctttcttcctctcttctgtctgctcttttttatatgtctctttttcttttttcgatagcttattaaaccagtcaataaacgctttgtactctttcacaaccgtttttgtttcatcaaacatacgaagctcgccatagtgcatccaagcaacacggtcacacatcttttcaatctgaccgattgagtggctgacaaagaaaatcgtttttccttgctttttaaactcatttattctgtctacacacttctgataaaacgtttggtcccccacagaaagagcttcgtcaataattaaaatgtcaggatcaatatgcacggagatcgcgaaaccgagacgcgacttcatcccgctggaatagtttttaaccggctgattaataaaatcgccaatctcggcaaattcaacgatgctgtcatacatatcatcaatttctttattggttaaccccatcatcaaacacttgagccggacattgtcccggcccgttaattggttattcaaaccggcagcaatcgcaatcagcgacggctggccgttcatttcaatttcaccgctggtcggcggaataattttagccagcaggttagacatggtcgattttcctgacccgtttattcctacaaagccgattgtctccccttcatacacgtcaaaggagacattccgcacagcaaaaaaaccattatccttagccggaaaaaacaatcctttaatcttgtccgattgttttttatacaaatgatactgctttgaaacatttcgaaacgaaacttttagtttcatcgtaaaatctccttacgtattaaagaaagtcaacaaacttgtctctgaatttcatatgcaggatagaacctactaacaataaaaggaatgtgaacaaccaaaagtacagcgtgtacttcatgtcatggaaaaaccatgctccatctaagaagctgttccggaatccttcaataatatagaatagtggattcaacttcagaacaggcactaattcggggtggctttgaccgagtttcgcattaacatcccaaaaaattggcaacaagaaaaacaaaagtcttgttacggcctgcagcaaaaattgataatctctaatcagcacactgatcgttgagttaaacaaactaaacgaaaacataaaagcaatcatacagatgaagtaataaatatattgtaaccaatgcacactcgggaacacaccattaactaggagtacaatgatataaatcaccatcatgatcatataactaaataagttagatgcaattgccacggacggtagagaactaatcgggaagttcattttagccaccatattaatgcgcttaaatacactatttgatccatcaagtatagttggactgatgaaaaaccatgggattaatcctgccagcatccaaataataaaaggcacttcgcccgctccggttgtcacaggaccgccctttctaatccccataccaaatacgaaccagtaggccagcatttggataagcggatttaagaactgccataagacacctaaataattcatttgatatttagacttggtttcataagccgccaatcttaaaattaaaggaaatgacgttatttgctctctgagtatacgcaacaaatcattcattttttatcttccttagacttaattgtttttgggaatctttctgtttaaaatttgaaagcaccgctgattattgtaacagatcctgcattttttttcacttctcaacaagtatctaaaaagctgccgaaatatcgacagctatacattttataaaataacctaaattattcagctttaaatacagtattaacaaccttttcagatgaacgtcctgactctaaatagcaaaacttatcatagaaaggaccaaaagaaaccggaagcttataatcaggcgatgagatctgcttgatagcctcaatcgtttcttcagtagtttttaccaaaggaccaggagcttctttttcaaaatcaaagtagaaaccacgcaacttatcccggtaggtctcgatgtcagggacaaagaatagcattggccgttttaaatttgcaaaatcaaagaatactgaagaataatcagtaatcagcaaatcagaaaccatatacaattctcgaatatcctcataagcagaaaaatcatatgcaaatccttcaaaaggacctaaatcaaaattctcagctaccagataatgcattcttaagattacgatatattcatttccaagctcttgtctaagttgatgcaaatctaaatcgagatcgaacttataacgcccttttgcataaaactgatcatctctccatgtaggggcatataaaataacctttttatcacgaggaatatttaacctactctttatcaatgatattgtttcctcattattatcattatgaagaaaatcatttctaggatatccagattcaatcattgtcttgttaaactgaaacgcccgtgtaaagatctcagttgaataaccatttggggaaatcaagtaatcccaattagaagcttccttgataaaattccttttatattttttggtgtttgtaccaggcatatggacttcttccatatccattgcaagtctttttaaaggtgtgccatgccatgtttgtaaatatgttgtatgactaggtttcggaatccataatggaagccggctgttaacaacccaatactcagctcttgccatagcgaagagccattttaatgagaggcgattaatgtaaggaattcccttttcatcaaaaggcgctgaatattgtttatttacactccaatacattttatactcagggtggttttcccgcatatattcgtaaatcgctctcggattacaactgtattgtttcccattaaaactttcaaaaatgactgttttccttttaactggcattctgctagccatcatgaatagagatttgtatgttttagtgattaacttgtttctcatttttgtgatcttttttatttttgatactaatctcttcttctttcctttaataaagtatttaatccttgttttcaggctatagtcgtttactctgatacctagagtctgctttttctttttcttaaagacttcataacgaactggtgtgttgtttgttttaataatacttactaatccttttaatttgttttttcgatctcctaaaacaagagcagtgctgttgaactgaatatccgttccttcatcgtcattgcatatatactccataaaaagacgataaacataacgtttttcatttgagaaaggaatttctttcaaaggcactttcacttcaaaatcatacagttccggaacaaaaccatctgctctcatgttttccaggccatgtgtttttctttctagcttgattggaaatttttcctcaataggtgtttctccacccttttttaaaataaggttcaagttttttatccgatattgattttcggaactcaggtaccccgcataacctgttatgcttatttcttcagagctaatctcgatttgatcaaatctgatgattttggcctctcttttcaccttaatagaaaagttgcctttatcagttgtataaggtaaaatcaaaagttctgtggtttgatcgacatgaaaggcgcgctcaattgaatttacttcagcagaaagacgcttcaagagtggttcctgctccgcatcttcatatttttttcgaaattcgacataaaaatcatatgtttgtcccatttcaacaggcataggcaaaacatgagcatttatctcagttttatactctaatgagccagtgttttgaagcggaaattcagattccgttcctgaacgtctctctttcagctttaaaaataactggtaatcctctaaaaattggtgttctgaatcaattgagattaacaattcaagacttcctaaattgtttttcaagcttttcaaaatacatttaatcacagtgttttcaatcattacttttttctgctcctctgtataaaagctctttcctttttgcttccttttattagtgtcaactactaaggacattacccaaaatattaactctcttttatttccgtgaccctccaagagaaattgcctttaactgttgtatagggctctactctatagccattattagtatctatactgtttcctgacaattttgtttcttcactcgaaagtcttcgcattgttttaatatggccatttgcattgaaaacaatataaaaatcaataacttgggttttattagcagctatcttttcaatatttacatctttttcgagatcaattacaaacagttgatcattttgtaagtttgttgaaataatttcagccttattctttctgtccaagcccactaaacgtatttttttaatatcattatgatcaaaattctcaatgtcaatttctattttagttttatcaaaatcctcagtataggaactaatagaaggatctttttttccaacctttttagagaacttctctctttctattcgcacctcaatcatctgattaagagcaaaagcccaattttcaatatagttgggtcttgaatatttttcagccattttaaaagcttgttctgaaaatttttgatgagtactttcatctttcatcaaagagataatagcttgacccaatttctctatattatactgttcaatgacatatccatttgctccgtcagtaactaagctccttgctccgtaatcataatcgtatgttacaactggacatccattgctcagtgcctccatatttgatagaccgaacccttcaaaatgagaggttgaaatggttagccaagctttttgaaactctgagtcagggttatccgtatagcctttcaaaaagacattattctgcagtttggtatcttcaatttctttttttattttttcgaaatcttcacccgatccgaatatatcaagttttgcttcaggaatttctttcacgactaaactaaatgcttttactgcatgtatcagatttttcatagatgcaagtcttgaaataatgacagctttgtatttttcactcggcacattcaatacagcgggatcaagaggcttatcaattgtatgcggagtaaagaaaaacgtctcttgttcccctgaaatcaatttaaaatcttctagctgctcctcagttataaaaaagacagcatccaaattatacatctgactaaatacttctttatagcgacccttaatttgatatttattgctgccgtaatgcttgttatgaataattgctccataataggaagaaggtgattttttcactttaaagacatgtttgtcttgcggtctgctgtccactaaaaacaacttaggtttatcattttgtttttgcagatattctatccaatattgacgcagttccgattcatcttttacttttatctcaccctcaagggagtaccaaataatatgagataattgaacatctttttcttcattgttccatacatagagtttgtctaaatatacttgattttggtcattaatatattcctgcagatacatcttgtttagctgcacatcataatgagtaacgagaactaagtttccgttcttcgtatattcctctctctttatgagctggtttttatcattccaatagtcgacgtaccggatagtttctccatctccgtagtaaattacagacatttcattgttcttcttaccaaacaatctcgacacagtttttgcaaattttcccattccaacttgcttttttatctggtcaaggcctatcctttcttcgtatgatcttttcccatttgttctaacacttaaaaaatcatcgaatagattaataacacttgtgaattttttatcaatcttaccgttgctgtacaattcatcaatttttgaagacaactctaaatcaaaacgaaacgttaagaaaaaggtgttttggttacactcttctccaaataattttgaacgcaataataatgatttcgtcagaccgccataattacttggcagtccaccagagataaaataataatccatgtcaggaatttgttttatattagattcactcaccgcatgtaaagacaattttttactccctttcggcatctagaatatatgatcattgaaatttatatctacccggatactttagtcacaaaaatcaatgtaagcatcaaaaagtacttcttatttcaataagaagtactttaattagatattgaaccaatgatatcaggatcctaaattataaaccagcaatttcctctttgatctttgttgtagagatgccttctgttcttgggaggtaaacaacctcacactgatctttgagaaagtcaaatttaccttcccagtcatcccccataacaaaaacatcaatattatgatcaataatatcttgctttttttgctcccaattcttttcaggaattacttcgtccacatatcgaatggtttctaaaattaatttacggtgctcatagctgtgataagcttttttttgcttttgtaaattgaattcatccgttgaaatagcaacaactaaataatcaccaagctgctttgcacgctcaagcaatttaatgtgaccccaatgcagtaaatcaaaagttccatatgtgataacttttttcatttaaagaaacgctccttcctaatgttaaacactattaaaaacactactgacgttagcgattaaattctaaaaacctgtttgtattccttatatcgacatatttctcgtatgtcttcactgatcattaattatagcataccgcctaaaaaaggttaagtactcatgaggagaaaaacattccaaaatatgtaattacactcagactccattggcaccaaggtctgttgttcattcgttcattcaattgtaaaattggaaacatatttaaatttaatgtaaagataatgttaatcctttgttgaagatttatgttaaaatataaggtagcttgattttgcttttagaaactctcggtttttaactatataaatagaatcttaaaggaaggaggagccagacatgcaaacagagactattcacaatattccttatgttaacagtaacttaacatcatttatcgattacctagagaaacattatattgatcaaaagattggtgctgtcatttccacagtcaaccctgaaattgcatttgcagctattaaagatcgggactactttgatgtactatcttcttcaaacttcattttgcctgatgggatcggtgtagtcatgatgtcacgtttgactaacaacaggcttcagtcccgaatcgcaggttacgatgtttttaaagaacttctgggcgttgctaacaaaaagaaaaaacgcatatttctgtacggtgcgaagaaagatgttataaaaggtgttgtatccaaaatttcttctgaatacccaaacattaaaatcgcaggttattcagacggttatgttcaagatcgcaccctagtggcaaaacaaattgcaagagcaaatcctgacatggtattcgtagctttagggtatcctcatcaagagaaattcattcataactacagacacttgttccctaaagccgtatctataggtctaggaggaagctttgatgtatttagcggtaatgtcaaacgggccccttcctggatgatacgtttaaatttagaatggttctaccggttaatcttgaatccatggcgatggaaaagaatgcttagcatcccaaaatatgctttaacggttttaaaagaagaaaaaaacaaaaaaactttctatccaaagcctgaaaaagatcatacaaaacagatttaaaaacgaaaactttcaaataaatggatgataaaaatgaaaataagatcactactggcgaattgctatttgtattttttatcagcaatcgccttttttctgcaatgggtgaaacctgaaagcaaagtgaccctcctgatctcattcgaagcaaacgcaaaagcgattcttgaggaatatgaacaaggacaatactcttataaacttaacatcctgtatacccagcaggcctctgctattgccgagagcttcccgaatgtagatgcatatttattacaagaaaaaaaccctatccatctcattaaagctgtatacctaatgtttaacagtaaagtgatcataacagataattactttctattaacaagtgtgttaaataagcggaagcaaacgaaatgtatccaagtatggcacgcaaatggctcactcaaaaaatttggtttggaagacattacaaacatgcaacggacgaaaactgatattaaaaggttccaaaaagtatacagttcgtatgattatttaactgttggctcagaagagatggcaaatatcttcaagaaatcatttggaataaaggataaccaattattaaaaataggtgtacctttaacagacccttattaccgagaaaacaagaaaaaaatttcagatactctaaacatacaaagaaaaaaaataatcctctatgcaccgacgtttagagattataatatgcaatcaattcaattgccttttacagaagaacaattaattcatcagttaaaagaagaatatgttttatttgttaagctgcatcccgccattcagaacaatattgatattaaatattccagtgattatattaaagatgtttctaattatgccttgtttgatctactcatggctgcagacatattaatcactgactattcttctgttccctttgaattttcgattttaaataaacccattcttttttatacttatgatttaaaactttatcaacagaagcggggattggttgataattatctttccataatacctggaagagcctgctatgacagtgaatcattaataaatgaaattcaaaccccatttaattattccaaaataaaagttttttccgatagatggaataagtattctgatgggaattcaagccaaaatttattgaatttcatcgaaaatttaataagctaaatgatgacacttgttcaaaacagaacaagtgttcttttttctcttgactaccgaacgtatgtttgctttaatgtaattagttgcttatggcagcaaataataatagaggtggtaaatttatgagaaaaaaagaactgtttgatttcaccaacatcacaccaaaattatttactgaactacgtgtagcagacaaaaccgtacttcaatcattcaatttcgatgagaaaaaccaccaaatttatacaacccaagtcgcaagtggattaggaaaagacaacacccaaagctatcgcataactcgtctatctcttgaaggtttacaattagacagcatgctgttgaaacatggaggtcatggtacaaatattggaattgaaaatcttaatggcaccatttatatttggtctctatacgataaaccaaacgaaacagataaaagtgaattagtttgtttcccatataaagcaggcgcgactttagatgaaaattctaaagaacttcagcgattctcgaatatgcctttcgatcatagggttacacctgctcttgatatgaagaatagacagttggcaattagacaatacgatacaaaaaataataataataaacagtgggtgacaatctttaacctggacgatgcaatagcaaataaaaacaatcctctttatactattaacattcctgacgaacttcattatttacaaggtttctttttagatgacggttatttatattggtatacaggagatacaaacagcaaaagctatccgaatctcataactgtatttgattccgataataaaatagtgctgcaaaaagaaattactgttggcaaagacttgtccaccagatatgagaataacttccgtgaaccggaagggatctgtatgtacaccaatcctgaaactggggcaaaatcattaatggtgggaattacaagtggaaaagaaggaaatcgtataagcagaatttatgcataccattcttatgaaaacttcatgaatcatgtacctatgcttcgatcccctttattaaaaaccgtggggcaccaagatacacctccagaaagatttcaaccatttatgcaaaccttcattttagagtataatgctcaaaacaaaaaatggatggttccgacttcaggttatttaccatcttacacatcaaatttagtccgaaatattactatcaatgcagatggaaacttgcaagtcacattaaatgaacgctatattagtttactgcatcaatcgatagaaggagatttccgcttaaaacaaaaggatatccgaatgggatcctggtattttgctggcggagaaaaatcaaatgtgcttgaaataggttttatgaaagggagtacaaaaatcagacccgatgatgcagccatctcaaatgcttcaagaatgagtatttttatgattgttgcggacaagattgaggtgtgataaacaaataggctgtagctattaaatagctacagcctatttgcaactttctaagttttttatcgatattccggaacatcaaaataaagtgtatagccgtccagcaatgaatacaggctgtacatgcggtttacttgtttgtacgcccagccgatgtctgttgcgtattgatgtgtcgctgtagctgaccatctcattttgtacagtgtgtcctgattgtaagctgtgttgtggatatacgatgagcctatgaatttagctccgccgataatggccgcttcaggtgtgaaccagccctgctcgtacgcatatttggctccgtagtaattcggattgctgtcgtatgctccaattccatacatgttgtatacggtttttccgttataggttaatccattggctaaggcggatgtcccgtttcctgtttcaagaagagcgtgtgagattaaatacagttcgttgatgctatattgattggcggcatcgataaatgcctttgctctccctgtcaggatgcctttacccgcaagcactttctgattgacctcagtaacgctgaggcccgctgtctgtgacagcttgagaaattggaagtagtatttgctgtctctggtaaagttatttggatccacgtattgaactacttcatcactgcttgcgtttcgccagcccaaattgatcttagcccagccgtttatctgtccgatgattttcactttatcgccttttttaaattggccgatcacgtttgtcgggctgacttccggcgttgaccggatatttagtacatcagccgtaacggttgatgttgctatattaatgtacgtgagcgatacgtaagccgctccgtctgtttgcggacttactgtcatttgtttttggaccatatcacgaagcgagagattgtaatttgttttcatgatttgcgggccgtttttgatcttcacgatagatgatgtccatccgtataattgttttagcttcgttgatgccgcagcagctgtatcattgcctgtgaactgctcatttacgctgattttataaagcgtattgcttttcgttgtgtagctgggggttacacttttcgatttaagataggttaacccattattcaatgctgttttgctgctgagctgtgttgtcacgattttgtattgtgtatatgctgtctggcctgtttttgatgttgtgactgcgatatgattttgtttgaaaaatgttaaaacgcggtcaatctcttcttggctgataatagcttcagttgtgatttgatagctgctcgcagctgtctgaccggttttctggcttgctgctgatatatgattcgatttgaaaaacgtgagtgcctgattgactttcgtttgatcaagcagagattcggttgtgattttaaacgtgccagctatttgttttttgacggatttcgcagaagcactcagctgatttttctttaatatgttcaagccctttgtgacttttgcttgatctgatgtttcttctgagatgagctgatattgattttctgctgttgatccagctgctgtttttgcagcttttacttttttctgagcaaagaaggctgctgctttgtttgcttgctgctcgcctaaaatctttgccgtcgtgatttgataagctgcagacgttgtcgtttttttgacgctggatgacgtgtaatgccattttttctttttaaagaaagtgtctattttttggagctgctgttttgttatacccttcatattcacggtatatgatgtgctttttccaacctgttgataactcccggatacgccagtgtttttcttgatttggctgatggcgtcctttactgtactcagccctttgaaataagctgattggacattgtatgactcaacggttgttttttgattgatggacttgtagctgcctgtgatgccagtgctctgtttcagctgctgcaatagagttttggcattggcttcacctgaaatggcggcagttgtaaacgtataataggcttgccctttcactgtttcctttaatgatgcctgcagcccagattccttttggaaggcgtttttgatctgcgctgctctgctgtctcccacgattgtgccagactgaatggttgtgacagacaccgtgtgtgtgatgggctgatacgagcttttaatccccgtttgcttggccaggctctggataagcgccttgacttttgtctcatcagcaatgtctgatgtcatgacgttcatatagggctgagctgctccgtaagcttttacagcgccagccactcccgtctcctgtttcagctttgctaggatagtgttggcctgtttttctccggagatggcacctgacgagatggtgacatatggctgtttgcttccaacaggacttgacgttcctgtaatcgatgtctgtttggcgagtccgctcagtattgctttcgcttctgattcgctatgaatgcctgaggcggaaatttggtaggtcgttgttgtgcctgaagcctgataggatgcatcccagccagtatctttttccagtttggcgacagcttgtgaggcttggctttctgtactgaacgtattcgacggctctactttatatagtgagtagtcggtatacgcggctgcctgggcagaaccagacatggcaaaaaaggcaagggacgcggcggatagaagcataggtgcgattagtctctttttcattccttctcctctttcttattctatgagtatataaaactagtttatttatcggcacgcggttgcttcatttataggtgaatcacttccattttctaataaaaaaaaaacttaatctcgaagtgagattaagtctaaatatgagacacgataagggtacaaggtccttttatcgtaaaatcgggcatttgagccggcaaaataaagtgatcgccttttttgagcggacatgttttgtcctcatacatgagcaaaccgcttccttctatcacgctgcaaatcagaaaggattcatcctgagccatttcagcttcgccattgatgtcccatttataaaccgaaaaatattccccttggacaaatgttttaatggttattccttttctagattctgtcgattcatctatatacccgtccacatggggaaccgtggccgcattgaccgctttcgcaaaatgaagctctctcggacttccgttgctatcaagacggtcataatcgtacacccggtatgtggcatctgaattttgctgagtctctaaaacaagggcccccttgcacaatgcatgcagcgttccgctcggcacataataaaaatcacccggtttaattttgattcttcgcagcaggccctcccagtcaccgctgttgatcattgtgacaagttcggtttttgagcgggccgtatgcccgtaaatgatttctgcgttttccttacagtcgataatgtaccagcattccgtcttgccgagttctccctcttcgttttctccggcatagtaatcatcagggtgaactttaattgacgtatcttccttcacatccagcagctttgtcagaagcgggaaccgatccccctctacgccgccgaatacttcacggtgttcttcccaaagctcgatcaatgtctttcctttatacgggccatttgcaacagtgctcggtccttttggatgagcggaaatggcccagcattcccccgttgattctgaaggaatactgtatccaaatctatctcgtaaagcggttccgccccagattttttctttaaacacaggcgttagaaaaatcggtgattgcgtcatgatccgtacccctcccctgtaaataactgatcatcattttcccggtgcgcccctcttacaaacgcccgtataagctgtcttttttccgatgacaacatatgtacaaagcatcatcttttcattaccccttcaaagaaaacgcttcctatctattatatcacgtcgaaaagaagctttgtttcagccttttcctcgataagaataattctccttttttgatacaaattaataaaaaccgtcaatctgtttacgaaggagagaaactatgcaaatcgactctgatctccagaacaatttagacaaactgaaaaaaacattgggacaaaacgacgatatgatgttttatacatttgctttcggagatagcagacaaaaggcgtgtttactgtatattgacggtctgacagagaataaaatgctggcgcaatacgtcatttctcctttacaaaaagaggcgttagcccataaggaatgctcgattgaagacttatccgccttttttttcggctttcaccacagcgttgtttctacaatgaaagaaatagagcagctcgttttttcagggcaagccattttgctcgctgatggctatcgcggaggattagctttcgacaccaagtcagtcgcaacacgcagtcttgatgaaccctcctccgaagtcgtggaacgcggccctaaaataggatttattgaaaaactgcggacaaacacggcgcttttgcgtgaacggacgagtgatcctaatctcgtcatcaaagaaatgacactcggaaaaaggaccaaaaagaaaatcgctgtcgcttatattcaggatatcgccccagattatgtcgtcaaagaagtgtttaaaaggctgaaatcagtcaatatagataatttgccggaatcggggacgcttgaacagctgattgaagacgaaccattttcaattttccccacaatattaagcacagaacgaccggaccgggtcgaaagttctctattagaagggcgagtgtccatattagtggatggtacgccgtttgctttgattgtaccggctacggttgacgaatttattcattcgcccgatgattacagccagcgctggatcccaatgtcacttgtacgccttcttcgttattccagcatcctgatcaccatttatttgcccggtctgtatatttctctcgtttcttttcacaccgggctattgccgactagaatggccatttccattgcaggcagcaggcttaacgtaccattcccgccttttgtagaggcctttatcatgatctttacgatcgaattgattcgagaagccggattaagattgcctaagccgattggacagacaattggccttatcggcggcgttgtcatcggacaggcagctgttcaggcgcaaattgtcagtgcgcttatggtcattgtcgtttctgtcacagcactggcatcctttaccgttccttcatacgcctataactttccgctgcggatcattcggatcggggttatgataagtgcaacagcgcttggcatgtatggcgttataatggtttatctgtttgtgatcggccatctcatgcgcctgaaaagctttggacaggattacattatcccgatcatggcgcagcctggacaggatttgaaagacacagtcatccgtattcccacgatgtttttaaaaagaagaccgacacgaaacgatcccgaagataacatcagacaaaggtgatggctatgaggaaatcagagcataaactgacatttatgcagacgctcattatgatcagcagcacattgattggtgccggggtgctgacccttccccgctcagccgccgaaaccggcagtccgagcggatggctaatgatactgctccagggcgttatttttattatcatcgctctgctttttttgccttttcttcaaaaaaacagcggaaaaactctttttaagctcaacagcattgtagctggaacattcatcggctttctattgaatttatatatctgtctatatttcattgggattgtttgctttcaagctcggattttgggagaggttgtcggattctttttgttgaaaaatacgccaatggcagttgtggtgtttatatttcttgcagttgccatctatcatgtaggcggaggcgtttattcaattgcaaaagtatacgcttatatttttcctataacccttattatttttatgatgcttctgatgttcagctttcgcttgttccagcttgattttatccggccggtatttgaaggaggctatcaaagctttttctctttattcccaaaaacattattatatttctccggatttgaaatcattttttacctggtcccctttatgagagatccaaagcaagtgaaaaaggctgttgctctgggcatcgcgacttccacattgttctacagcattactttgctcattgtgattggctgtatgactgtggctgaggcaaaaacggtgacatggccgaccatttcccttattcacgcattagaggttccgggtatttttattgaacgatttgatttgttcttacagctgacctggacagtccagcaatttgcctgtatgctcggatcctttaaaggcgcccatatcgggttaacggaaatctttcatctgaaaaataaaaacaatgcatggctgctgactgcaatgctggctgcgacgtttttcataacgatgtatcccaaggacttgaatgacgtgttttattacgggacgcttcttggatatgctttcttaattgtgattacaattccattcttcgtctggtttttaagctggatacagaaaaaattagggagggggcagctacaatgaaaacagcaacaaaattctccgtcatgttttttatgctgctggtcctctgcgggtgctgggatgtcaaagatatcgagcaactatccttcgccagagggctggcgatcgatgagacagatgatcaccagtacaaactgacgtatcaaaaccttcttccccaaagcgaagacagccaagcatccggaaaacccgaatttgtcaatgtgacgtcccacgggaaaacgattctggaagcagtcagtgatgtatccatcaaggaccctcctgtttatagcgatcatttaaaagtcattcttctgggagaaaaactgatgaggaatcaaaatgtagaccaagtcctcaaccactttatccgagatgatgagctgcggcgaagcagctatttgatggcagccagagggaatgcagctgatgttctcacaaaaggaaaccccaatcagcagcagccgatgccctccgaaaaactgattgatttgacaactcacagcggatataacggtaagattatgataccgctgcgcatcggaagagcttctgtctactctcagaacgggtacagttatcttattcaagccgtgaaaaacgaaaagggaaaagccaagtatgacggagcaggcattatcaaaaggggcagcaataaactcgttgggtttctttcagctgatgaaacccaaacactgtcatgggtcatggggacgatccaaggcggtgtcatgccgacgacagataaaggacatccgattacgtttgaaatcaaaaagtcgaaaaccaaaattaagcctatcattgaaaacggaaagcctatctttcatatttctgttaaaacgaagggcatcctgacagaagaccaaaacccgaatgaaaactcctttagcaaaagttatttgcacaggctggaaaacatttttgaaaaaaagcttgaacgagatgtaaagcaggtaatggataaactgcagcacgagtataaaaccgatccggtctttttatcagaccacataaggattcaacaccctgactactggaataaagtaaaagggcattgggatgaaatattttctgagactgattttaagtacgatatttcttttaaaatcattaactttggcacggtgggaaagtaagcaatcaaaagggtgcgcatgatcgcgcacccttttttatgttccgacagtctgctgttttccggccgatcctccctgtccgtttttgtcccgtaaatcctgctcaatttcttcaaggctttttccctttgtctctgtcactttaaatcggacaaataagaacgccatgataccgatcgcggcataaatcaggaataaataactgattccgatcgcttccattaatattggataggttaatgaaacaatcagtgtcccaacgtgcaacattaaggtcgaaacaccggtcccgattcctctgacgtgaagcgggaacaattcaggaagcatcacccacacaaccggtccccagctgaccgcaaagacaacgataaacacgcctaaacaaatgacggtcgtccatgaggcagccggagtgttatcgaaaaagagatttactaaagcgagaacgatcaagctgatcaccatgcccgcattcccgaatagcagtaacggctttcttccaatcttgtcgataattttaatcgctactaatgtcatgagaacattgactgtgccgattccgaccgtgcctaaaatcgaagcggagtttccgaatccgacgtttgtaaaggtctttggcgcatagtagatgatcgtattcgttccgataaattgctgcaaaaaagcgagtcccaaacctgcaataagcgctgggcgcacccatggatcgaacagctccttcaggccgccttcatcctgcttttccgcttcttttatatcatgtatttcctgatcaatatcttttgtgccacgcaatttttcaagaatgttcttcgctttgctttcttcgccattcgtgaacagccagcgcgggctctccggcataaacaaaatgccaataagcaagagcaatgacggcacagcagccaatccaagcatccagcgccacgcttcggcatcggcaaatatgtaattgacaatgtaagaaagaaggatgccgaccgtgatcatcagctgattcagtgatgacagcgccccgcgtttatgttttggcgccagttcagataaataaaggggcacgattgtcgtcgatgttccgactgcaagtcccaaaatgatgcgaaacagcaccatgactcctgtatttggggccagtgccacaccaagaccgcctatacaaaacagcagcgcggctgccataattgctttttttcttccgaaacggtcagtcagcttgccggccgctcctgagcccaatatcgccccaaccagcaaggagctgacaacaagaccttctgtaaacgcgtttaagcctaactcctttttcataaataaaatagctccggaaatcactccggtatcatagccatataacgcgcctccaagagctccgaaaaaataaagccatatatttgactgctttttcataaagatgactccctttctccatcagctgcaatgacattgtctgtgggatttttttagaaatcttttagcctctttttccggccattaaacctttttattttgctgatcataagttttccaatcatttacttgtatttttttcaatgtcgccgaaacattttacctgctgcggcgtccaatataaggtgattcagtacatcatcgttatcaattttcaaaaacaagaacttataaatataggaatatttatcgaaaaatgtctttcgagtagttgccccatggcaaatagaatggtacgcttcaaatattaaagaaacgtgaggtattgatatatggaagaacgatcacagcgcagaaagaaaaaaagaaaactaaaaaaatgggtgaaagttgttgccggattaatggcttttttaatcattgcggcaggctctgtcggcgcctatgcttttgtaaagctgaacaatgcttctaaggaagctcacgtcagccttgcacgcggagaacaatctgtaaaacggatcaaagaatttgatcctggaaaagattctttttctgtattgctcttaggaattgatgccagggagaaaaacggcgagaccgtcgatcaggcaagaagtgacgcgaatgtgctggttacatttaatcggaaagaaaaaacagctaaaatgctgagcattccgcgtgacgcctatgtaaacatcccaggccacgggtatgataaattcacacatgctcacgcttacggcggcgttgacttaactgtgaaaacagttgaagaaatgctggatattccagtcgattatgtcgtagaaagcaatttcacggcttttgaagacgtcgtaaacgagttaaatggcgtcaaagtaactgtaaaaagcgataaagtcattcagcaaatcaaaaaagatacaaaaggtaaagtcgttcttcaaaaaggaacacatacgcttgatggggaagaagcgctcgcttacgtaagaacacgtaaagcggacagtgaccttttacggggacaaagacaaatggaagtgctgagcgccattatagataaatcaaaatcattaagctcaattccggcttatgatgatattgtggatacgatggggcaaaatttaaaaatgaacttatcccttaaagatgccatcggcctgttcccgttcatcacttcattgaaatcagttgagtctattcagctgacgggttatgattatgaacctgccggagtctattatttcaaattgaatcagcaaaagctgcaggaagttaaaaaagagctgcaaaacgatttaggtgtataatgaacgggatggcgattacgccatcccgttttacatatttccttgttgaaaattatcaaagtaacgtttagccttaatttatatggattatgtttcacaggcaagctgaacatactacacgaagcagcttcatttttaaggaggttcccctacatatgaaatgtattgcgattgatctagacggaacattactgaataaagaaagcgtcatttctgcggaaaacagagaggcgatcaagcgggccgttgatgccggcatcctcgtcaccatttgcacgggaagagcgacatttgatgtaaaagcgctgctggatgacttggacatccctatcattgcagctaatggcggtacgatccacgacacgggttaccgtttgatcagccggacattaatggatcaggaagccggtaaagcgattgctgattacttactttcaaaaaacatttactttgaggtatatacagatgaccatctgctttctccttttgacggcgaagctaagctgcacgcggagcttgacattctaaagagcgcaaacccaaacgagcagacggatgaattgtggcagggagccatgactcaattcaaacagtttggcattaaaccaatccctcatatcgaatcggtttttgacggcggtgaaaacatttataagcttctttgcttctcctttgatatggacaagctgaaacaagcgaaggaagaactgaagcatcataaaaaactggcgcaaacctcttcaggaaaacatattatcgaaatcctgccggcctcgtcaggaaaaggacgcgcgttaacaaagctggctgacctatacggaattgaaacacaggatatctatgcgatcggcgatagtccaaacgatttgtccatgtttgaagtcgccggacaccgaatcgccatggaaaatgcgattgatgaattaaaagaaaaaagcacctttgtcacaaaaagcaatgacgaaaatggtgtggcctactttatagaccagcttctttcaggacaatatgcataaagaaaagactccagagattggagtctttttcttttattgcacccgtatacttcctgcgtatttatccttccaatatgtgctcgtgttcatattggtgatggtcacgccgtttgataatgtaacgtgaacaacttgtccgtttccgatatagatggagggatttaagcttgttgattgaaagaacacaatgtctcccggcttcaggtccgccttctcaatcttagttccggcattgtactggcttattgcgtatcgaggcagggaaataccggctgctttctggtagacatattggacaaatccagctgtatcaaatcctgtctcaggtgttactccgccctgtttgtaaggcacttctccgacataaagcgtcgcttcggaaacaatcggattttctttcgggattgtcaggttgtcaaatcggcgaatacccgtcatcttcgatttccagtaatcctctgacaaataggaaatggttactttttctgaccggcttgcctgaatgaacctgcctgcgcccgcataaatgcctgcatgtgaaattcccgttttatacgtattgctgaaatagacgacatcaccaggctttatgttctgaggggctaccttctcgcccactgcccactgctgttcggctgatcgcggcagataaatgccgagtgcctgttgaaacacatattgcacaagccccgagcaatcaaagccctctgacggcgtgcttccgccaaacacatatgggacaccgatatatttttcggcctcctgaacgacaggaacatcagccgttgccggatcggcagcgattcgtctcgccccgatataagttccgctccaatagctgctttttttgtaattggtgatgataaccccttttgactgtgtactgtgaaccatttggccgtctccgatataaagggcgtcatgtgtcggaacagtgccggtgcttccctctttcttgaaaaacaaaatatcacccggcttcaggttttccggctttacagctgttccgattttatactggtcgtttacagatctcggcagatgaatatcagccttactgaacacatattgtatcaatcctgatggatcgaaaccctcttttggcgtttccccgccatatttatactgatatccaagcaggttttttgcttcactgacaatcaattctgatgatgtatcagcttccgcaatctccgcttttgtcataattggaaccaaaaaacaaatgataaccgccacaagcaaaaacttcttccagtttgccagtgtgttcacttttattatctcctcctctttttgcagttttaacatcggtatttttttgaatatgttaagagactttttaatatttttacagaatgaatatgctgggcaaataaaaagagagtgtctcctcagacactctcttttttgaattatttattggcgtttaccggttcttcctgctgctggattttattcatttccatatcaatcttctgtttttcctgatctgtcagctgatcattgaatttaaaagctgacataaacatgaacacgatggctacggcaacaaacggccagatggctttgacaaatttcatctttatcactccgtttatttagattttagtttgtcactatgatcaatatcaaacgtcagttttccgtcttctactttccaagcgaaattagagtctttcgtcagttcgcgaataatggttttctgtttaaggctgtcttttttcacaggtgcaggtgtcgcttcatggatatcgatcggtgtcacttcaaagcggcctgttccatttttcttcaggtgatactgaaccagtgcactgtctcttgttctcgtccagccttggtcaaagacaaagttgccgaggctgtagaaaatgacggttccgttatatacttcaatcggttctaagacgtgcggatgatggccgacgatgatgtcagctcccgcatcagacatggctcttgcaagctggcgctggcggtcgtttggatcattgtcatactcttggccccagtgtgactgcacaacaacgatgtccgcatgttttttcgcttctgaaatcatagggatgaagatttcaggatctgcgggcagcacgcccggcgtattctttttagccgcgaaacctttcccggacacatcggtaaagccaagcgttgcaattgttaccccgttgactttctggtacgaaattttctttttcgcatcacttaagctgtatcccgctccaacgatatcaaggttttgcttcgcaaattctccaagcgtatctttcatgccctgaacgccgtaatccattgcgtggttgtttgcgctgttgagaactgtgaaattcatgtccttcaagactttcactgattccttattcgtctgcagatgaatctctttatctgcttgtttataattcttttgataggttaccgggttttcaaagtttcctgctacataatccgaagctctaaagatcggttcaacatattgaaaaatactgtctgcccctttttgctccgttactttttcaacatagcgtcccatcataatatcgcctacaaatgaggctgaaagtacgtcgtcagaatacgttttgaccttcggcgtttccgcttttcccgcccacatgaaagcgaacataaggacaaaaacgatcggaatggcaataaatacgtgcttattggttttctttttttgctgttttgtcagctttagcagcttttcatgaaagctcagttcttttttcatcgtttgacacaccttacattaaattaagtagtaaacaaacatgatagcaaaggtcgctccgctcaatagcagcgtgcttccgaacgtaatggttaaaccttgtttctgaatggtattggcaattaaacctggcacgatgatgccgattcctcgaaattctgcgatttcaaatggtacaatcgggtatagaaaatcaaacgcgatttttaggacgatccctgttatcagcatggcagcgaattttctgcgtccgtacaaaatcataaatttggataaaccgtatttcacgataacataagtgagcaagctcactagcaaaacaagtaaaataaagaccggctgattaaacacaagtcctaaatatcccggtacaacaagtcctgccggcacgatccctgttttttccgcaaaaattaaactgagtagtacacctaaaattagtgcgatgtataaatctgatccgaacatgtttgcatttccccctagcttacgagctgcttaaccttgtattcgtggattttttcaattaaaggctctgcggcaccatgaatattgccgacgccatatatgacacggttgtgcattcttttctttaacaattccataatttcatctgttgacttatactctagatcatgcagtttgtctgcaggaattttgccttcttcgtaggcttttacgaccggttctgttgtttcaccgattaagatcagttcacttgcttcaatataaggcaatacgtcatttgcgaattgctgtgtccgatcgacacggtctgcgcggcagttcatgatgatgatcggatcatcggtcgggtaaccgatttcttttacacgtttccatatattcaaagtagaagaagcgtcgtttgcggcaaacccattaacaaagtgcccaggctcgctcggactgatcagcggaagaattctcattgctcccggatctggcggcgcattcagcattcccttaaatgctgtttcttcgtcaatgccgagtgcttgagccacacccagcgccagagaagcgttatcagggaataccatgtattcaaatttacgtaaatactcatctgtaatttttgagttatcagcaatgatgacttttgtgtttcgttcttttgctttttgtttaaagaactcggtatattcactatctgtaatgacaagatggccattataaggaattgtagcagtaaacgcttctgcaatttcatcaagcgtcggccccatgacatccatatggtcttccaaaacattcacaatgacgccgatattggcctgcagaagttcttcctgaaagatgatttgataatctgggttaacagccatgcattcactgacaatcgcgttagcccctctttctactgtttctctcatgacttctttttgctctccgatattcggcccctgaggtttccgtttaatcggcttttcctccggtgtgtcccagtaaatcattcttgcatctgttcctgttgtttttccaacagtcttgtaaccggcttctattaatattccggttgtcagccttgtcacagtcgattttccgcggatgccgttaatattcacccgaacagggagggcatcaatgtttttctgatgtcgtcgtttttctaatattccgatgaccagtatgacagcacaggctataatgagtaaccacattgcttttcgacatctccttctatattgttgtaaattcattcatcagtatatagaatcactatgaattctcaatcggcattatgtaacataatcttccctaatcgactaagccaaacttctcttttgaaagagattttatacctacaaactgttttctatttttggaaaacagcaggacttataccttatcacttttttaaaaaattgaagagaatgcgctttcatttttctcctgatatccttctggacgtatagtcacaccctgctgtttgtatttaatatgcatttcaaatcaatctttttttcagcctgtgttatcaagcatttcctgctatcatgcgtgtttccggttcttatgaacacaaaataattttatcctgtttcttaaggacaaggtcataatgtcatcctttctgcatggaataagcaatatgaggcccattccaaaatgactaaggaggttcgagatgaaaacgctaaacatacgagtccgaattctctaacataattaaacattttctgggatgatagtcttttctgtttctcaccatttacaggtctaaacgcatgactttgaaacaattttaataaaacttaatatttgttcaagaaatcttcatccatatttgtgaagactttgtcaaaaaaagagtgaaaaccttaaatttttcaattatatatacaatttacaagtagatttcttttgatatttttattgctaacttcggattgttcatgataatctatatatgtaaacggttacataaacaaggaggagctgttttggctacaattaaagatgtcgccggagcggcgggcgtttcagttgcgacggtttcccgcgtcctgaatgataatggctatgtacacgaagaaacgcgaacgcgtgtcatagcggcgatggcgaagctgaactattacccgaatgaagtcgccagatctctatataaaagagaatcccgactgatcggacttttgctcccggatatcacaaaccctttcttcccccagcttgcccgcggtgcggaggatgaattgaaccgggaaggctatcgtcttattttcggcaacagtgacgaggaattgaaaaaagaacttgaataccttcaaacctttaagcaaaatcatgtcgcaggcattattgccgcaacaaattacccggatctcgaggaatacagcggcatgaattatccagttgtttttctggacagaacactggaaggggctccttctgtgtccagtgacggctatacaggaggaaagttagccgcccaggctatcattcacggaaaaagccagcgcattacgctcttgagaggacccgctcacctgccgaccgctcaagaccgctttaacggcgctttggaaatcttaaagcaggctgaagttgattttcaggtcattgagacggcttcattttcaattaaagatgcacaatcaatggcgaaggagctgtttgccgcttatccagcgacagatggtgtgatcgcgagtaatgatattcaagccgctgccgttttacatgaagcattgcggcgcggaaaaaatgtgccggaggacattcaaattatcggctatgatgacattccgcaaagcggacttctgttcccgccactttctacaattaaacagcccgcatatgatatggggaaagaagctgccaaactgcttttgggtatcatcaaaaaacagccgctggcagaaacggcaattcaaatgcctgtcacctatataggaagaaagacgacaagaaaggaagattaagatgcgtaatatttgtgtgattggtagctgttctatggatttagtggtcacctcggacaaacgcccaaaagccggtgaaacggttcttggcacgtcatttcagactgtgccgggcggcaaaggagcaaatcaggccgttgccgcagccagacttggggcgcaagtgtttatggtcggcaaagttggagacgatcattatggaacagctattttgaataatctcaaagctaacggcgttcgcactgattatatggaaccggttacacatacggaaagcggaaccgctcatattgtgcttgctgaaggcgacaacagcattgtcgttgtcaaaggcgcgaacgatgacatcaccccagcgtatgcgttaaacgcgctcgaacagattgaaaaggtcgatatggtgctgattcagcaggaaatcccagaagaaacggttgatgaggtgtgcaaatactgccattctcacgatatcccgatcatactaaacccagcaccggcccgcccgctcaagcaggaaacaattgatcacgctacctatctgacgccgaatgaacacgaggcttcgattttattccctgatcttaccatttccgaagctctggcgctttatccggcaaagctctttattacggaaggaaaacaaggcgtccgctattcggctggcagcaaagaggtgctcatcccgtccttccctgtagaacccgttgatacaaccggagccggtgatacgtttaacgcagcatttgccgtggccctggctgagggaaaagacattgaagccgcattgcggtttgccaatcgtgccgcttccctttctgtctgctccttcggggcccaaggcggaatgccgacaagaaatgaagtagaggagctgctttcatgaaaaaacacggtatactgaacagccatcttgccaagattttagcagaccttggccacactgataaaattgtcatcgcggatgccggactgccggttcctgacggcgttttgaaaattgatctttcactgaagccgggtcttccggctttccaagatacagcggcagtgctcgctgatgagatggtcatcgaaaaagtcattgctgcagctgaaataaaagcatccaatcaggagaatgcgaaatttctagaaaatcttttctctgaacaagagattgaatacctttctcacgaggagtttaagctgctgacaaaagacgcaaaggcagtcataagaacaggagaatccacaccatatgccaactgcatcctgcaggcaggtgtacttttctagaaaggaggatgaaacatgcagattgaaatgaaagacattcataaagcattcggaaaaaatcaggtgctgtcaggcgtttcctttcagctcatgcctggcgaggttcacgcattaatgggagaaaacggcgccggcaagtccacgcttatgaacattttgacaggcctgcacaaatcggatcatggtcaaatcagcataaacggaaacgaaacgtatttttccaatccaaaagaagcggaacagcatggaatagcctttatccatcaggaactgaatatctggccggaaatgaccgttcttgagaatctatttatcggtaaggagatatcctccaagctgggcgttttacaaacaagaaaaatgaaagcgctagcaaaagaacaatttgacaaactctccgtctctctttctcttgatcaagaagccggcgaatgttccgtcggacagcagcaaatgatcgaaatcgcaaaagcgcttatgacaaatgccgaggtaatcattatggatgaaccgaccgcagcgttgactgaacgtgaaatcagcaagctctttgaggtcattacagcgttaaaaaagaacggcgtctccattgtctatatttcgcatcgcatggaagaaatttttgcgatttgcgacagaattaccatcatgcgtgacggaaaaacggtagatacaacaaacatctcagaaactgattttgatgaagtcgtcaaaaaaatggtcggacgggagctgactgaacgatatccaaaacgcactccttctctcggtgacaaagtattcgaggtgaaaaatgcctccgtaaaagggagttttgaggatgtcagcttttatgttcgttccggtgagatcgtcggtgtttcaggattaatgggagccggccggacagaaatgatgagagcgctgttcggcgttgacaggctggacacgggtgagatatggatcgctgggaaaaaaacggctattaagaacccgcaggaagccgtgaaaaaaggtctcggctttattacagagaatcgcaaggatgaagggcttctgctcgacacctcaatccgcgaaaatattgccctgcccaatctgtccagcttctcaccaaagggtctcattgatcataagcgggaggctgaatttgtcgatctgttaatcaaacgcctcactatcaaaacagcatcaccggaaacgcacgcacgccatttatcaggaggaaaccagcaaaaagtggtgatagccaagtggatcggcatcggaccgaaaatgcttatcttggatgagccaaccagaggtgtggatgttggcgccaaacgagagatttatacgctgatgaatgagctgaccgaacgcggcgtcgctatcatcatggtgtcatcagagctgcctgaaattctgggaatgagcgatcggattatcgttgtccatgaaggcagaatcagcggagaaatccatgcgcgagaagcaacacaagaacgaattatgacacttgccacgggagggcggtaatatgaaaacggaacaactgcaaacagaacaaaaacggattcacttcgacggagtcatgcaaaaactcggcccgtttcttggtttatttattctcgttatcattgtatctattttaaatcccagctttcttgaaccgctgaatattttaaacctgcttcgccaggtcgccattaacggattaatcgcgttcgggatgacctttgtcattttgacaggcggcattgatctttctgttggcgctattcttgccctgtccagtgctttagttgcggggatgattgtgtccggtgtcgatccggttctcgcgatcatccttggctgtatcattggtgccgtactaggcatgatcaacggattattgattactaaaggaaaaatggcgccctttatcgccacgcttgcgaccatgactgtgtttcgcggactgacgctagtgtatacagatggaaatccgattaccggacttggcacaaactacgcttttcagatgttcggacgcggttactttttaggcattcctgtaccggcaattacgatggttcttgcctttgtcatcctttgggtgcttcttcataaaacaccattcggacgccgaacgtacgctatcggcggcaacgaaaaagccgcgctcatttcaggcatcaaagtgacgcgcgtgaaagtgatgatctattctttagccgggcttttatccgctcttggaggtgccatattgacttcccgcctgcattcggcccagccgactgcgggagaatcgtacgaacttgatgctatcgcggcagtcgtcttaggagggacaagtctttctggcggccgcggacgcattgtcggcactttgatcggggtcctgatcatcggcacacttaataacgggcttaatctgcttggcgtttcatcattttaccagctggttgtcaaagggattgttatcttaattgcggtattattagaccgcaagaagtcagcttaggagggttttcacatgaaaaaggctgtatccgtcattttaacgttatcattatttttgttaactgcctgttcgcttgagcctccccaatgggcaaagccgtcaaactcggggaacaaaaaggaattcaccattggcttgtccgtctcaacacttaataatcctttttttgtctcattaaaaaagggtatcgaaaaagaagctaaaaaacggggaatgaaagtcatcattgttgatgcacaaaatgattcatcgaaacagacgagtgacgtggaagatttaattcagcaaggtgttgatgcattattaatcaacccgactgattcttcggcgatctcaacggcagtagaatctgcaaacgcagtcggtgtgcccgtcgtaacaatcgatcgatctgccgaacaaggaaaagttgaaaccctcgttgcttccgataatgtaaaaggcggtgaaatggccgcgacgtttattgccgacaaacttggaaaaggagcaaaggtggcagagcttgaaggcgtccccggcgcatctgccacacgggaacgcggctcaggattccataacatcgcagaccaaaagctccaagttgtcacaaaacaatcagctgactttgaccgcacgaaaggcctgactgtcatggaaaacctgctgcagggacatcctgatatccaagctgtttttgctcacaacgatgaaatggcgctcggtgctctcgaggcaattaacagctcggggaaagacatattggtgatcggttttgacggcaataaagatgcgctcgcttccattaaaaacggaaagctgtcagccaccgtcgctcagcagcctgaattaatcggtaaattggctacagaagcagcagatgatattttgcacgggaaaaaagtgcaaaaaacaatatccgcgcctctcaaactagaaacacaaaaataattgtctgatgtttaggaacctgcgataacgtgaatagagatatagaatgaattatttctcttacgtgaggagaggaacggcatgaacaaaccaacaaaactattttcaacattagcacttgcggctggaatgactgcggcggctgctggcggcgctggcacgatccatgctcaacagccagaaacaacggtaagcattgatgatttatacagttatccgattgattcttatttggtatcagcagaggctctaaatgtcagaacgaaggcttccgcatcaagccaaaaagccgatacgctgcacttaggagatagcctaaagctgatttccttctcaaatgctgactgggcaaaggttcagtataaaaatggaaaaacaggatttgtatccactcattacattgttaaagcagcgacaacggtaaaaaccaaaacaaaaacaaaagtatatacatccgctgacggaaagagcattaagactcttccagcagacacaagcgtttcttttttaggctggagtaaaacgaataaaggcggttttgattttgattgggtattcgttgattacggcggtgcgacaggttatatgaaaacaaaggatttacacatgacaaaataactgagagggattccgcatttatgcggaatcccttttattatgaattgatttgtcacattcccaagatatttctcaggaaatattgtcgtatgctgtgtcgaaaccttacatgatcatcaacatttttgttcacgctaaaaagcggaggtgtaaatatggatcaatttgaagcagcatatgaatcgtataaagcccggcaaacaactgtcgatcaagaaaatgttccatctggaaaagaagaaattattgcggttagaagaaatgaggaagacaatattatcgcagtgaaaaccaatacaggaagagagctcgactatcctactgcgctgtcagaagcaaaatcaggaaaactcgctcatgttgatgtcttccataaatacgggcgtgacattttgcgaagtgaaccggacggcatcaaggaaaataatctgtctgagctgccggatttttaaacaaatacagccctgccgtatgttcgacagggctttcttttaaacaaaaggctgctgaatgtattcggctaaccgttttgcactgtgtgaaatatcctctgcagctgcataattcacgccatagaacacatatggaggcagatacttcatgccgatcagattactcgtggcctgaaatggtttcaatagctcactgatcgagtaatgatttgctccgcccgcttgatatttttccgcttcgctccctgttgatacagccagcatcagctccttgccatgcaaggcatttccttctgaaccaaaagcccagccataagtcagcacaagatcctgccattttttcaagagcggcggagagctgtaccaatatagcgggaattgaaagacaatccgatcgtattcctcgcacagctgctgttccttcgcaacatctatcgcttcatccgggtattccttataaagatcccgtactgtgatattgtcatgtttactcaattcctcagcccacgccttattaacaactgaggtctccatatgaggatgcactgccaaaaccaatattttcatcagaccacacctttactgttttgatgttattttatctaaaatcaggaaaagagccaaataaaaagaaagccctgctaaaaggggctttctttttttcttttattcagggcttccttcagttgtttcgatatctttcgcaaaatcagggttatccagattcgcattaaagaaatccgctgtgttcggaagtctgagattcatgttcattttttgagaaatcgtaaccgtgcaatcctcaagcacatagtcaaaaacgtgtccgcctgaattgcgtccttcgtcaatgaagtgcaggtgatagccagaaacggcgattccgtttgcataagctggtgtcaagaaacctacaatcgttcctctcacgttgtcgaagttgaaaatcggctgtgttttaaccgcttcaaccattggcacgtaaggtttttcttgaagttctactgttcttgtctgcacctttttaaacaatccgtcaatgcgaattgcataaaataagtttctgcttggcagcatgctgttgatctctttttcaaagtcttcgcgtgtcattttcgcatcaattttgtgcgtcatgtccggtgtaaagaacgtaaatgaacagaacggtgaacggtctccattttggaccggtgtcgcggttccgtctgagcgaagacggtaaaattcgccgtcaaacccaatcagctctccgtcaagcttgttaaaggttccgataccgaagtctccatatttcggaatctctgacagttcaaaatctccgtcatatactccgtctaatagagaagtcattgttgatacttgataaatctggctcacaggctgatctttttgaccacggctgagcacttgaatgttgctttctcgtttcatatttcccttcactccttttatttagtgctgttcataaaacagtgtcgtgatgcgcagagtgctagagagcttttgttttcataagttccccgaattctttcggaagcttgtcacttgctaaattaatgttatcactgtagtcaaccgggacatcgatgatgacaggaccttcagcgttcatgccttgacgcagaacatctgccagctggtctggtgattctacgcgcaagccagttgctccgaagctttccgcatatttcacgatatcgatatttccgaaatcgaccgcagatgtacggttatattttttcaattgctggaatgcaaccatgtcatatgtgctgtcgttccatacaatgtgtacaattggtgcttttagtcgaactgctgtctctaattccattgctgagaataagaaaccgccgtcaccagagacagaaaccactttttctcccggtttcaccaatgaagcgccgattgcccaaggaagcgcaacgccgagtgtttgcataccgttactgatcattaatgttaacggctcgtagctgcggaaataacgtgacatccaaatggcgtgcgaaccgatatcgcaagttactgtaacatgatcatcgactgcattacgcaactctttaacgatttcaagagggtgcgctctgtctgatttccaatctgcaggcacctgctcaccttcatgcatatattgttttaaatcagaaaggattttctgctcacgctctgcaaattctactttcacagcatcgtgttcgatatgattgatcgtggacggaatgtcaccgatcaattcaagatcaggctggtaagcatgatcaatgtcagcgataatctcgtctaaatggataattgtccggtctccattgacattccagaatttcggatcatattcaatcgggtcatagccgatcgtcagaacaacatctgcctgctctagcagtaaatcgccaggctggttgcggaacaaaccgatacggccaaaatactgatcctctaaatctctagaaagggtaccggcagcttgatatgtttcaacaaatggaagctgaacctttttcaaaagcttgcgaaccgctttaattgcttccggtcttccgcctttcatgccgaccaaaacgacaggaagttttgctgtttggatttttgctatggccgcactgattgcatcatctgctgcaggaccgagttttggcgctgcaacagcacgcacgtttttcgtatttgtgacttcattcacaacatcttgcggaaagctcacaaaagcggccccagcctgccctgctgacgctattctaaatgcatttgtaacagcttccggtatattttttacatcttgaacttctacactgtattttgtaatcggctggaatagcgccgcattatccaaagattgatgtgtccgttttaaacgatctgcacggatcacgtttccagcaagcgcaacgacagggtctccttcagtgttcgctgtcagcagacctgttgccaagttagaggcacccggtcctgatgtgactaacacgactcccggttttccagttaaacggccgactgcttgggccatgaatgctgcgttttgttcgtgccgggcaacgataatttcaggtcctttatcttgtaaagcgtcaaataccgcatcaatttttgcacctggaatgccaaatacatgtgtgacaccttgctccactaagcaatcaacaacaagctccgcccctctgtttttcacaagggatttttgttcttttgttgcttttgtcaacaccctcactccttattatgcattttaaacgtaaaattttaaatatcttgtgataagtttcactatacactctttggaaattgacctccaatatcgattcgccttatgattaatatgtaatacgaattattaacctatggaaaggaatgcatattgaatggagcttcgccatcttcaatactttatcgcagtagccgaagagcttcatttcggaaaggctgcccggcggctgaacatgacgcagcctcctctcagccagcagatcaaacagctggaggaagaagtcggagttacgcttctgaaaaggacaaaacgatttgtcgagcttaccgcagcaggagaaatctttttaaatcattgccgcatggcattgatgcaaatcggacaaggaattgaactggcacagcggacggcccgcggcgagcaaggccttctcgtaatcggttttgtcggatcagctacatatgaatttctgccgccgattgtccgggaatatcgtaaaaaattcccatctgtgaaaatagaactgcgtgaaatatcctcgtctaggcagcaggaggagctactaaagggcaacattgatattggtatacttcatcctcccttacagcatacagctttacatatcgaaaccgcccaaagcagcccttgtgttttagctttgcctaagcaacacccattgacttctaaggaatcaattacgattgaggatttaagagatgaaccaattattactgttgctaaagaagcatggcctactctatacatggattttattcagttctgtgaacaagcgggcttcagacccaacattgtccaggaagccacagaatatcaaatggtgattggtttagtcagtgccggaattggtatgacatttgttccttcctcagccaaaaaattatttaatttggatgttacttatcgaaaaatggaccaaatacagcttaatgcagaatgggttatcgcttaccgcaaagacaatcataatccgcttataaagcattttattcatatttcaaattgtcagcagacaagaactaaagagagtgatgcaggtacatgaacaatacttgcaatctcttttttcttttgggattcttatggaatttttattaatttaatataatcgcttagtacaactttatatcagtatacgtatacatacagtacaaatagttggcaaggacatcagtaagcgcaggacattagtttgattttaaaaatgaaagatagagaggtgaagtaaattattgagttcaccggcatattcacattgctcgcttttttcgtaacaatgatttttattttctggagaccaaaaggactaaatgaagctatccccgccacatttggcgctttaatggttttattgtgcggaagtgtgtcattggcagacttaggggaaatcggaacaaaagtcacgggtgcatcggttacaatccttgccactatgattatggccattgcactagaaagctttggtttcttttattgggtggctgcaaaactgctccaacaatccaagggttcaggcatcaagcttttttggctaaccaatttgctctgctttctcatgaccattttcctgaataatgatgggagcattttgatcacaactccaatccttttgcttgtactaaaatatttaggtttaaaaaaacatcaaaaagccccatatttattaagcggtgttttaatagccacagcctctagcgcaccgattggcgtaagtaatattgttaatttaatttctctcaaaatcattggaatggatctatatcttcacaccgccatgatgtttgtccctagtatgatgggactcatttttatgacttgtctactgtttatgttcttttataaacgtcttcccaagaacctgccagatataccgggccattttcagtctctgcggcatagaaggtaccatcctcttcattcgccatcagctcctttaccagaacgaaatcaaacaaaaatcatgttgtttgtgcttgcatttgtttttctcgtcagaatgagtctatttgcagcatcatataccggtatttctgttcctctagtcgctgtcatcggatcttttatcctgttgagctggagatggatttatttcaaaacctccccaagagacttgttatataaatcgccttggcacatttttatattcgcttttactatgtatgtcttaatttatggtctgcataatattggattcacagagttacttgtgaattattttgaacctgtggtttctggaagcctcgcccatgcaactttcgcatcaggtatctctacttcagttttttctaatctctttaacaaccatccagcgttaatgatcagtacttttaccttaactgaaatgaccctgaatccttcaacaacaaaaatcatctacttggccaatattatcggcagtgatatcggttcattattattacctatgggaaccttagcaacgcttatttggatgcatatattaaaacagtatgatgaaagtatttcatggggcgaatatataaaaacgaccattatcatcattccgctgactgttctttttacgttaacatgtttatatttttggatcagttggttatttctttagcacagtatgaaacgaaaaactgccttctgctattcaagagggcagttttgcatacactagggaagatgcattgtctttagatgatttaacttccaaatgattggctctccatttgcgttaataagctcaatgatattattagagacatcctttaatagaccaactttttctggcacctctcccatatcaaatatgaccaattcaccaatattttttttgatctgctcctcaaaattacgcacaagaggaactttggaaggcatgacaggcaattgtgagttgtcaagagtgtacggtgtttgttcagttgaataaggggtaaaccattttaaatgatgcatagatataaaaagtattttaaatacaggtgagaaaaatacaatataatcgtttaaaacatttgtaacatacccatggatcgatcgacccccagttacataaacttcaataaactggcctttgaccttgtttaatgtatttctatatgaaaaagcttgagtttctgcctctatggatggatcttccggattgatcaaaaatggcttctcagtactggtcattattttcgccttgtttatttgatgaagatgcaacaagggaatataaagataattgcagccatcaaaaataacaaaaatatcctgtccgatatctatgagggtgccgacaaaccttgtatctcctgaaatgacaacctcaacatctgtgttaaggaattgattcaaacctttcacgattctcctcctttaactgaaaaagggcatcacttaatctgatgctcctccattatctattaaaatttacgtttccagtgatagtctatcgttctgacaatcgtttcatagctataatcatccttttgtttttctgaacttttgaaggaacttgaataacctggtgatcttgatgattgataatctgatgatcttggtgatcgtttagatgattttgatgattgataatctgaagattttaatgatcgtttagatgattttgaagaactttttgaacgtgacgaacggccagatttggatgattgataatccgaagattttagtgatcgtttagatgattttgaagaactttttgaacgtgacgaacgaccagatttggatgattgataatctgaagattttagtgatcgtttagatgattttgatgagctatatgattttgaagaaatgaacgaattgctgtccttatcattattgtcttcctggctttgttcatttttttgatcctcttttttgtacgacccttttggtcctaagctgatgctttttatgtgaaaaggatagatgcgaagcacctcttgatttttcactatagtataatggccgtcggcattatctacaaggataccctcaatggcttccggacctccacgattaattgaaacccatttatgagtcagactcttaaaaacctcgcttaaatcatcagcttccaaaactccaactggcgtctgctcttctattttcaaatcaggctcgtgtttacttatacttttgatgtgatggatattaaaatacactaccccatcctcatttgtgtttaacgcagcgtaatcatctcccagccagaccaatcttccttttttagattccggacccccttggttaaattgaactgattggtttattaaatgtccgattaagctatgaaaatcatcagcatcgagcatttcctcagtctcaattgtcgtggtgctattattggtatcctcagtaatacttttcacatgctccaactgataataaattatttttttttcagcttgtaaagctatataatctgattttacagctgttaattttccttttttagattccggacctccacgatatacagtaacaattttatctttcattgagtgcaaaaagttataatacgatatttcattatttgaatgatatttcattctcctcttgctcattcaaattcctcctagtcacttatacatagatgataaacatactgcatatatacgtgtcacatttatttgttgaactaattcaatagcctaattgtcgctttttccgcgaatacccattttcacgcattcataaaatacttaaatgatctttgaggtattgtgaacggtttttaatatactcgcagatcacatccggctcacggtcaaaacgctcaacatcattctttttatatgggtccatcaagataaaaggcctaatccgttcatacatcgccatgattttcggttccatatattctattgtaaaaagagattggagcgttttttctaacaggcgcttgtaggacttgcgaaactcggattcatccaatatccgggcggttagtgtattaaatccttgaattcttacataatcggcagccatccgctctccatggatatccctgccccaagtcgcatcataatcccaaggaatcacctcaaataatccggtttccccgcttctgtataatgcgtagttgtggacaaacccgtcatagtttgaggtgaatacaataccggcaagccagcgcaaatacttgtcgacatccacgtgttttgtcacttctgacttaaactgagctttagggaccgtattaattttaaaaatcatatcctgtaaataaaaatcatcctcctcagtccctgttttcttttcatatccaagctccagcgatgttttcgtttccctttctaaatcgctcatcagagaaaagttggcatcatcatccaccgcataaaaaatcgcgccatcagccagcttccttttcgccaaataatattcatctacggattcaagttcaagataaaccccttcattcttcccattcatctttacaaacacaaactctgcctttggagacagtgtccctagctccgagaaaaaatccagagacaatttgtttctcatcaaggaaggatctttatactccgcatttaagtgaatctctcgcgcgccgcggaatgttttcggctgataaaaggaaatatggtatgacttctttttgaagtctctgatatgtgatccccgataagcaatatcaatatccagccttttttgatttaccttcatcacagctggcaccggatcatcgtcccatatatccttttttaattcacgcaagtcttttggatgaacaaacagctgataaagcggtaaattggattgattcttcatccataatcctccttacaaattttaggcttttatttttataagatctcagcggaacacttatacactttttaaaaccgcgcgtactatgagggtagtaaggatcttcatccttaacatatttttaaaaggaggatttcaaattgggccactattcccattctgacatcgaagaagcggtgaaatccgcaaaaaaagaaggtttaaaggattatttataccaagagcctcatggaaaaaaacgcagtcataaaaagtcgcaccgcactcacaaaaaatctcgcagccataaaaaatcatactgctctcacaaaaaatctcgcagtcacaaaaaatcattctgttctcacaaaaaatctcgcagccacaaaaaatcatactgctctcacaagaaatcacgcagccacaaaaaatcgtaccgttctcacaaaaaatctcgcagctataaaaaatcttaccgttcttacaaaaaatctcgcagctataaaaaatcttgccgttcttacaaaaaatcgcgcagctacaaaaagtcatactgttctcacaagaaaaaatctcgcagctataaaaagtcatgccgcacacacaaaaaatcttatcgttcccataagaaatactacaaaaaaccgtaccaccactgcgacgactacaaaagacacgatgattatgacagcaaaaaagaatactggaaagacggcaattgctgggtagtcaaaaagaaatacaaataatctaagttttcattgtttcaataggctgccggcggaggtacggaagcctatttttttatttgccctgtattagatatatgtcatgacataacatatgcaacccgcatcatttggtttcctttaaaccatttcgttataatcaaggtatcctaacgataaaggcggttgttgctatgtacatatttcaagctgatcagcttagtgccaaagacacatacaagctattgtcaggtaccgttattccccgccccattgcatttgtgacaacactttcttcaggaggagcggtcaatgccgcgcctttcagtttttataacgtcgtcagctcagatcctccgcttctcagtatttctgttaacaggacggaaggacgccaaaaagatacagcgcgaaacgcagtggagaacggagaatttgtcgttcatgtcagtgatgaagccatcattgaagatatcaatgaaacagctgcaagcttaaggccggatgaaagcgagcttacacgcacctcgcttcatcctgttgaaagcaaagctgtttcagttcccggcattaaggaagcccgcgttcgctttgagtgcaaattagagcggcatattacctttgacaatgatcaaggcatcactacagcagatctgctcatcggaagagttgtctgcttccacctagatgaaaaggtgtatgatgcagaaaagggatatattttaacggatgaattaaagcctgcctcacgattggcgggaaatcactatgccaagctgggggaagaattcacactgattcgtcccagctgaagagaaggactatttaaatagaagaaactagtcaaaaagaccttatgattacaaaatatcgcctgtaaataactgaaaaaatatcaaaaaaaagaacacccagagcaagctcggggtgttcttttatgaaacgtttttcctttttcttcgtataaaggtagattaggaggaattggaatgacaaacttttggattttaatgctgatcgctattaccatcagtctcgcctctcaattttttataaagaaaaaatacggtattgataaatccggctggcgatataagcatgtcagcaatacacacaaatggatcgaaatcactttacttattttgtttgtgttttcactctccttttttccagttgaatatttgcttcttttattttttattgtgattgactcaatacgaatttttatggagtggcattatagacctgaagataaacagtatatgtaccacattgtagaggtctcacttatgtttatgcttttgatttatatttgtaccctatagttatttaaatccccacagccgctccgtctccccgaggatcggctccgccttggagaaagccttcttcatcaactttgattgcagccgcttgtcccatcagcggatcatagtcaccgacaacctccacgagatgcccgctgtctttcagtttttggattgttttgtctgtgaatctgccctcgactctgagaccttcgtattcctctccccacgttctgccccatacccagcgcggttcgctgattgcttgctgtggatgcattccgtagtccagcattcgggtaatgatggccgtctgagtctgcggctggccttcgccgccttgtgtgccgtacagaatttttggctttccgcttttacagaccatagccggcatcaacgtatggaaggtgcgctttctcggttcaagcgtgttgacatgattttcatccagtgagaaaaatgatccgcggttttgcagtaatatgcctgtatcaccggctgtgactgccgagccaaattcaaagtacaggctttgaatgaatgacactgcgttgccatccgcatcaattacggccgcatatgccgtatcacttcccaccggcctgctttctgccggttctgccagaatgccgatttctcccgccaatcgtttcgcataatttttatccaaaagcctttcaagcggaatgtcagcaaacgcagggtcagtcaaaaaggcattccgatctacaaaactctttttcagcgcctccacaagcacatgataatactcaaatgaaccgtgctcgatttgggtgaaatcatagttttccaaaatgttcagtgttaataaaccggtaaatccctgagaattcggcggcgcctgatacacactgtatcctcgataatcacttgatacaggctctgcccactcaccccgatgcgctttaaaatcatcgattgtcatgtaactgccgttattctgtaaatgtgagacaattcgctgagcgagatctccttcataaaatgcgcttcttcctttttcagtaatcaagttcagactgtctgcaagctctttttgcacaaaccgctctcccgggacaggcgctttgccccttctcgtgaagatgtcagccgtgtaaggcgtggaagccagcagttcaatattcttttctgtgtgacgacactgatcagctgatacaggaaacccattttgggcataatcgcgtgcgggctccaatacatctgcaagagacagacgcccgtactccttcaggaccgcatcccagctatcaaccattcccggcacggtaatggcactgtcaattccccgcagcggaatcgcgctttttcccttatatacatctctcgttacgttttttcctgaacggccgctgccattgtagacttttactgcctttgtttcctggtgaaaggtcagccaaaaggaatccccgccaagtccggtcatatgcgggtacacaaccgcaagacaagcactcaccgcaacagcggcgtcaaacgcgttgccttccttatccagtatgcggtttccggcttgagaagcgaggtaatgcggactgacgaccatttgctttgtaccgatgacagatctgttcatcacaagtccccttttttaagaaattttcttcagtatagggagcctgatttttcacatctactgatccggcagaaaaactgacgaactttcttcttttcgcaaataacaagatattttcgcattcatttcgaaaacaaatgaaaaattattatttcgatacgtaacttttatgataaaatgattgctaaaaggctacgaaagcaggtggagcaattgagtcatgaatatcaaatccccaaccttgtacttgatgagactgataaacaaattctcacgattttgcatgaagaaggcagaatttcttatacggatcttggcaaaagagtcgatttgtcacgggtcgccgtccaggcccgtatcaaccaattaattgaagccggtgttattgaaaaattcaccgctgtcatcaatcccgctaaaatcggcattcatgtttccgtgtttttcaatgtcgaggtagaaccgcaatttttagaagaggtcgctcttaagcttgaggaagagcctgcggtcaccagcctttatcacatgacaggcccgagcaagctgcatatgcatgggatctttgccaacgatcaagaaatggaagaattcttaacaaaacggctgtatccattgcgaggcgtcgtcagtgttgattgccagatgctgatcaaacgatacaaaagccgtatgggaatgaagctgtaaaggagagaaacgaatgaaaaaccatccttatcgggatatgacggccgcaatggttcgcaccggcatattagggttcggcggcggaccttccgtgattccgctgatccgccatgaagcggtcaataaatataaatggattgacgatgatgaattcggagaaatattagcaatcgctaatgcgcttcccggaccgattgccaccaaaatggctgcttatctgggctttaagctaaaaggcacattaggtgcagttgtggcgaccctcgcccacattctgcctacatgtcttgcgatggtgggcttgtttgcggctgtaaatgtgttaagccattcagcaattgttgcaggtatgatcggtgccgtcacgccggtaattgcggtaatgctcggaatcatggcgtacgagtttggccaaaaagcgcttaaaggtttcggctgggttaccggcatcctgttttttatcatcgcttttatcggcctgcaaactttacagattaatcccggcctggtcattatcattttcttagcgtacggggcgtttcattttaaactgaaagacaaaatcacaaataaacattcaaaagataaaggaatgtcagcctcatgatatcgatctatttatttatggcgttttttatcgcaaacctactgggatatggcggcggacctgcgtctatcccgctaatgtttgaagaagttgtaaacagatacagctggctctcaaacgatcaattctcaaacatgctcgcacttgcgaacgctttgccgggcccgatcgccacgaaaatcgctgcgtatgtcggctacagcgcaggcgggtggcccggcttcctaattgccctgatcgcaaccgtcgtaccgtcggcgctcgcattgatcgtcctgctgcgcatcatccagcgcttccgccaatcacctgtcatcaaaggcatgacgctgtccgtccagcctgtcatcgcggtcatgatgctcattcttacctggcaaatcggcgcagacggcatcaaagcgatcggctggatccaatcgatcgtgattgcgggaatttcgctccttgccatgacaaaattcaaaatgcatccggcatttttgattatcgcggcgtttttatatgggggccttgtgatccctcatttatagaaaaaagcacctggacaggtgcttttttattttggcccagaaatgccgtttgatatgacagctgtttcttctcctgcgtcactcttgatgatgtgcttgacttgcagcgtggttcctgccattctcacagattgcttcaactcggacgaattggtttcaacttgtatccaaacaggaggctggaccttccaaaataaatagagtgcaagaatcagcaagccagcaatgaccgacagcaaaaacttcatatcgcatcgcttcttttcagtaagcggcccgcagcggacagcgcctgatgatcacgaagaatatcgcctggacgattgccttctcccagcacatagcctttaaaggacattcccataaaatgaaaaatatgttcgaattgctgaatcagcggcagcccttttatttttggattgtctccgcccactgctattacatatgcctgtttcactgacatttgctgtttaaaatcaggaaatctcggatctctcaacgtctgtgaccagcgatcaataaacagctttaatgtccctgacatgccaaaccaataaattggggtggcgaatacaagaatatggcactgcaatatccgttcaatgatagaatcgtagtcatcttgaacaggacgaaagccgccttgggcgtgacgcagatcttcaattggctgaattcgatatttctgcaaataaatgtgctccgcatcgaatccttgaacagccttctccgcaagaacatccgtatttccgccagaccgagttccgccgttaataaccgcaattttcatgatgcatctgctcctttgtttacgaatgattttcttcatcttataatggattcatctatcaatacagatgattatttcgattaatccaatcgctaaaaccgatttagaaaggaagagaacaagtggaattgaagcagctgatcacctttattacggcggcagaacatgtaaacttcaccctaaccgccaaaatgcttaattatgcacaatcaagcgttacctctcagatcaaatcacttgaagaagaaattgggacgcctttatttgaacggctcggcaagcggcttatcttgacagaagcaggaaaaacgttcaaatcttatgcacagaagatcattgcgttaacagaagaagcgaaaatggccgcaaatcaagtaagagaaacaaccggaaccttaaaaatcggggcgacagaaagccagtgcacataccgcctgccccctatcataaaagaatttaaacaggcttttccccaagtaaagctcatattcaaaccatatatctccaatgaacaagcgaaagaacagctcttacagggccagcttgatatcaccttcatcttggatgtaaaccggatggaagacgcactgcacgttgaatctttgattcaggatgagatcaaaatggtggctgctaatgaccatccttttcctgcggatttaccagtaacattgaaggatcttcaaaacgaaactcttctgctgacagaggacggctgctcgtaccgcacgctctttgagaacaatttgcatgactccggtgtctatcctaacaaattggaattcgtcagcatagaagccatcaaacaatgcgtgatggccggacttgggattggaatcttgcctgaaatgacagtaaaagatgatattgcagcaggccggatgaaagaactcaattggcagagcgattgccccgttttcactcaattagcatggcataaggacaaatggatgtctgcgccattaaaggcttttatcgatttgacacggaaaacattcaaataaaacctctccacaaggacgacaaggtttttgagaccaggaaagcacacacatacaaaaaaacacttgatgacttagagccccaagtgttacatgtgatttttctgataaaacgttcgcaaaacatgcgtttcaaggtcagccaggcggacagggattggcaatctgctttcttgattgatcaagctcatcgtgatctgatagctgctgtctaaatcaatataattaccgcaagacaagaaaataggcttcacgtccccccgcgttcgcagcgcccggccatatacctcgccgtcaatgagaatatcggtgtatgcaccgacttcattttcaggcatcacgaaatcatagcctttgattttgagataggttttcgcaatcccaatcgtcggcttgcccagaaaaaaagccgcatgggtggcaacgcccatatgattgtaatgcagatatccgttgccatcaaacaagaagacatccggctccgtctccagctttttcgccgcctcgatgatcaaaggcagctcgcgaaacgcaagaaaaccggaaacatacggcacgctgattctccccatgctgtgcactttttcaatgacttcttttgtatcagcgtcaatcacgataatactgcacactccgtatggttctccgttctgctcccaataggcgagatcgacgcctgcgcaggtgttgatggagttgggatggatcgtgtgggataggttgatacgatttctaagggattgttgtgtttgaacaaaatccgattcatcttttagatgaaaatcgtgtatttgatgtatttccattttacttgtttccctctcttcgcgctcaattgtcctgcatgtcgattctagcaatgacaccaaattatatcattgaaaaaagcagatagtataatctgcttttttattactattcatttttcatttctttcataaaaatataatccaattgtttaattaattctttaagttcagtacacataatatcctctaaaggattttcccaatcttcgttttttatcagttcaatcccatagcttccggctggatcaccttctgggtaccaccctacgtcaagcagcaaattttttgtcttatgagaaatctgcaggagatcttgattaaagtcaaataaccaagcatcgtcatttgcctctagcgtcttaggatcagtatcctttaatgtaatataatcaacagtccaaccagccggtatctttagccttaaaaaattgggaatctgttggcttagtggctgtaaaccctctaaaaccccgcttcccacactccagatttgatattctaactcttctaataattgttctatctcattaaaagactcatcttcataaatcttatctgtttttaagccagctactttgatatggtattgattattttcataacttaccttaataaaggccttacgtttttcattttgtagtattagtaattcacatttttcttgcattcttttttctgaacataaattgttcagtactacagaccagccattacagatttttaatggctgcagttgagaaatatggtctctttccatcccgcttctccttgcactccatattgttatactatctataaaaaagcatgccgatgacaacacggcatgtttttaactatagcaattctaatacatcagagtaaacaaggcatctcctaatgttaatctcctgttgaaaggctgtatatgcggcaattcactccactcatacacagtatcgtagtaatcatacaaataactgagttcaataaaccctttctcttgcattattttattaatatagttcgttccctgaatgaattctaaagattcagcggtgcctacaatatcataaacgccatcgattaaatcgtgtcttagggaataactataatctaatacataaacaggaaccaatttagatactttcatattgatttgctgttctaaatgaaaaccattttccccagaaagatcttgcaaatggatatcaatttctcctgaaggattgtttaaatctctaacttcaatttttttcaaaccttttatttgattaaattcatcaggtacttttattttctctgcgcatttgttcttgtaccattcgcctaattccctattcacaaatagacgataaagcaactcaccaatttcaggatattcattaataaacctgattccatgttccataaatagtaaccattccatcctttaatcaagaaaatctaaacttcattccaccaagtagttgttacttgttttaaatgatattcaatatataaaatcacttttttatagtcatctgatgaaaattctttaataggatcttcccaatcattatctttgactagtaaaaccagataattaccttcaggagaaatgtcaggaacccagcctaaatcaagcgttattgaggattgttcatgataaagctgcaacaaactgtctgtgaacaaaaaccaggaatcatcattcggttctaatgttcttggatctatttcaacaaaatgattataatttactttccaaccttgtgttattcttaagggatgtatattagcttttggaacatctaatttaacatgttttctcatttatataacctctttagagagccgttattcttaaagtctgtttttagataacttgtcaaccaactatttgagtgggagacctgaaaggtgaaaatgtagattatgaataatatttacttagctgtacgaacttcattttacaaggctgccccttgcatctatattcatcttactaattatcttatagatcagtttcaatgcaaaaattttaagtttaaaaaacctcgagaggcaagcgccaatcgagggaaggttagtttttttctacttacttgttaaaggattaaaactgatattcttccagaaaaacgttatgagaacattagctgcatctcatattatctttcctctctgcacaagtgattatattcaccaaatttagggaaatcatcccagttgctcttaaggttgtcgctagtctcacgctcttcgaccgaaccggtcttgaaatctgtcttctccattgctatatgaccatcttcgcgaaagcctaaaatcaaactgctaacttcattatcagttgcatcatcatattcccaatacattgctgttcttaagaagattttaccatcacttataacttcaaaatcataattcagatacttacgagtcaagtcatcataaaaacccactgaaacccatttatttgttacatttacaacatatttaggtttttcgccttcggttaataccgcagtatatggttcatgtttttggtgatgtaagtatgcggtacaatcatcaagaatattccaaggctgtttttttatgtccgaccattcatcacaataataaactttcatagtcaattatacaccttcccatttatatccctaataataatcctattttttgttgcttcatcaagaattttttgtggaatagctttattttgaacaggtacttctaatatcaattcacctttcagtcatccgcctttaagagcttttggattaaaaggaccatttgatattttagaccctgaagaatattttttagtaatctcgttcaagtaactcagtgctgtcttttcttgaacgtcactaagttgagtatacttcctggaaactatctccttatttggagaatatgaatcaactacgtactttttgccgcctgcttcttttgcttctagctctacttcattataagggtaacgggggcgattttccttattgaaattatttcctgcttcccaccgttctttaagccaagacggtaatggattcttattagatgacttccccgtacccttaatacctttaccactactaaccatcttcacaatcccaagatccttaacagccgtcttttccacatcgacacgtactgtcgggattccgaatgtaaagccatccggagttacagggcgttctgcgtacacgtggacgtttgttgggactttgaattgttttactttctctagtgttttgtttgctttttggacttttgaatgggttgcaagcgggatgcctttatcaatatgtttcgccagtgcaccggctccaaccaaactcagcacagcttccagcgccccctgcttccgcttctcctcagacactttgtttccaaacatatcccgtcccgtgacggcttctgagaatccgtttgacgcaacaaggccgtatgcacccatttctgtcattttgagaatgtctaaggatttgcctgttttgtaggcgtctaaagcgtgttcagccgcgatagcagcttttccggttttgtagatggcttttccgcctttgaaggcgcggcctgcccagccgacgactggtataaatcccacggctgccatggtgccgactgtgacgcgttcaaagcctatacttatttacgctatataaaacagtggacaacaaactaataaaaaaaccttgaaaggcttcagtgccaatcaaggtagaaaatcaaaccaactcgaagcgtttatttgtttttaataatgccttaagattttttaacaatactattaattccttcaaatataatatctctcataacttcattattactgttataatttctttcatttcttattttattaaaaacctgctttataaccccatcaatcattattgttaatccttctatatcttcttcactaccctcctttttaaaactttcatttattattaccaagctatcatcttttgacattttattttctcctttactctctttctttctcattaaaaactttgtctatataatttacttcatcaaaaatccagtatctatcctcttcaggaatataactagtaaagtcttcccgaacccctgtccaattattaggaacataattttcaaaaggtaataactcaggatacagcgaaagaagcattttttgattaaagtctatatataatgatggccttaattctagaatagtactttcataatcctgatgttcaactaacttctttaattctgaagacgggataatatagtcagtatattcttttaaataaagacgataattatcttcatttacaactgaaatgttatttcttagagaaagagcaaagtccatatcaaaactaaacccgtttttttcataggcttctttatatttcatgatatctagtatccaaacatctctttctgttagataccatgagaattgagaagaagtctttaccccgactattatattttgggcatactccggttttaataacaacgaaaacaccactttctcattctatttttttggctgaatgcccatattcctctaaccactctatccatggttccgccggaagttcataactaactcccggtgtcgtaggatcaacaagctttggagcagttctcccctggttacgagggtttttagtatatccatactgatcaattactgtctccttgattaaatcatcaatctctttaggtaccttaaattctacaatttctccgcctggtcttgctacatctcgataatatttagcgtgttctaaattgtaagcacttatgtttaaatcagcatttttaataggaatagcaatgcttccatcactatttactttaattctatactgacttgttttatttcccgctcctcctccttgaactctgtaataacttactgattgttcgacaggatcgacagattttttacttgattgtaacttatcattatttactttcttcgtatataattgtttcttctctggctttaagtcaaatgtatggccagtcgaagtaacaatctgttctttatttatatgaccactttgcttaattttagaaaaagaataactcttatcaagatttcttcccatcgatagcgtattgtcaaccgacttcgccaatgcaccagcaccaaccaaactcaatgccgcttccagcgcacccgttttccgcttctcttcagacactttgtttccaaacatatcccgtcccgtgacggcttctgagaatccgtttgacgcaacaaggccgtatgcgcccatttctgtcattttgagaatgtctaaggatttgcctgttttgtaggcatctaaagcgtgttcagccgcgatagcagcttttccggttttgtagatggcttttccgcctttgaaggcgcggcctgcccagccgacgactggtataaatccggctgcggccatagctcctgctgtcacacgttctgcggtggagagtttttctccggtaaccggatcaacgccttcagttgctcttttataatcataatagccagtgacttctccagtaaagttgcaaactccatcccatgttttttcgtaccatggtttgtttgcttcttcctcggctttttcctggagacgtcttgcttctgcttgctgggcttttgcatcaatataggttgttccttgattttctacttcaatgacgcttttgtagacttcattgctgtggaaggcttttttgtcatagtacataggggatgcgctcttcccattgctggtggcctgcatgagaacagaatatttggtgagcactgcgttgtccagagattctaaattttgatattcagtggtcagggattcatcaagcttatcgacagctgtgatcgtgtcacgtctgactttttgggcatcgcccatcttatctgcatactcgtcaagcgtgtacatgtcgaggtcaataatatcgctgatgcctgacaaaatagaatcgatttcttctttatgagcggagactatctctgaggctttcaggtctccattgggcagctcatgatccaaaaatgaagtttccacatatgaatcattcagttcttgatctttaatatcgcctgaaatgccgtttaaaaatgcaatttgagcagagacaagcgtcagccagctgtcgacgatttccgcctgtccctgaaagaaatctttaatattgtccgcgccttttcctttaaaattatcgcctaaatctgcaactccctgaaacgcttttttcagcgtattcagctgctcttcaagcgtctcatattgcttttttctgctcttcgcttcttcgattaaagattttgattcaaatactttactcatcgcactgccctttctgttctattttaccgctatcgcctcgtcctgctctttaagtgaatctacgttatcctttgtatcctcgatatttttctgtaccgcttttttgtaatctccgagcatggttttgatgttctcctcacgctcatgatattttttcgtataatcgagtttattttttccattggaccccgcggcgccgattgatacgtcagcaagcgcatctttgacagactctaatgttttgattacagcatcgtatttcaatttaatttctgacataaaaaagatcaccacaatttaatagatttaatttgattaacagcatcctccaagaattcttcacccttagcaagagtatgaccagcaaaattcgctagctttaattctttgtcatagagaaatttcatagattccaactgaataatctccatctgaatcgaagccatatactcgttatatttatcattcacaatcttagatgcttccgatttcgcctcttctcttcccttgtcgaaatcatcggcttttgttcccgtccaatgcttgcccaattctggttttacaatttctttgatttcagtgattgcctcttcttgcagtgtgtctatgtccttttttgcttttttcagcttttcgatcttgtcttccacgtcggaaatttttccgttgagcgaacttttgatatccgccagcatactttcataacccatctgaatcacctcttaatactcaaaaagtcgtatggaggggctgatgaagatagacttttccatactttatttccatatattatattttaaaatagccagaaggcggcttaaatagggtaaatggcttaatttaggcatataacgctcttgaaatgtaggtatttgatcttgtttttgttcgttatacagctaatgaaaacgttttttaaaatgaaatcacctaaagtcatagttataaaggcacttgaaagaggcagatgttgttgatctgcctcttacggcgctgagcttattgttcatgtttatgttcttcatcaggtcggccacgtctgattttgtctttggcttctattattccccgcttctgaccctttggatcaaaagcttgtattagctgcagtcccagttgtacagaacgtttgaaaagtcttttttccttagatcgtcaggtgtgatgaaaaaattggcgatgccgacgtctccccacattgaatcgatatcatcgtctgaatcaatttgtaaaagcatgatggtgtgttctttatatgcgtattcccgtggatcatgctgggtaaaagaagcgtatccgccgattttatggccaaatccgttttcagccagttcattataaatgtcttcttcatcctcgccgaactgaccaaagaactccattgtttccatgcccgtatactgctcaaattgaaaatctgtaggcagcacccattccgaagatttcacaggctcgactgccgcttctgataaaatcggaaaatcacattcgcctgtgccaataaatgaaaaatcagaaacaaggtcgtcttcgttttctatgatattttcaaaatagatcactctgaaattcttttgttcacatcgatcgtcaaaattcaatccatagacgtcatcatgaagagaaatgtagaactgcaggatacctgaagaaggatagccgtcaagctggggaatgtgcgagaaattaatctgcgccagaagcttcatcggctgtccatattcgtcagtcggatatgtttcatgcttggggaaatagggatcaccggcaattttgctgtcatatcgtcctgttttcccttttctcacattcagtttcacgtattctttcgctgatttctccagcaagtcgcggtacggtctcattttttcgggtagatgattcatcagattctctccttttccggcatctccaaggttttattttctggttttcttcgtttcttctaatgtttttcaaacgattgtttaaagaagccctacttctgtataattttccaaacaatagttaaatagtagcaaatgtattcagcaccccgcaatagatgaaaaaaagactggtgcgcaaccagcctttctttttcaactattgaattgcacctgacggaacaaccgccttccgtccgacagaataatactccactcctgcagccaaagcctcatccaatgtgtagcagtttctgccgtcaaatatgagcggcgtttccatcaaatcctgataagccgctaacgggaattgtttaatgtcagcccagtcggttaaaatcatgacggcgtcagaccctttgacagcttcctcgatcgtctctttatattcaacagcttgcgggagaacatgctttgcatggctaactgcaatgggatcgtaggctctgatacgggcgtcgagcgcagcgagacggtctgcaataacaattgacggcgcttctctcatatcgtcggtattcggtttaaatgacaggcctaaaagggcaatcgtttttcccgtcaccccgccgagcctgttcagcgctttatcaaccagcatcgcctgctgattgttgttgactttgataaccgatttcagcagttcaaaatcatgctcgacattgccggcaatttgcacgagggcgtttgtgtcctttggaaaacaagagccgccgtagcctatgcccgcttttaaaaactggctcccgatccgcttatcctgtcccatcccgtatgcgactgcttcaatatcggcgccgaccttttcacatatattcgaaatttcgtttataaaactgatcttagtggccagaaaagcatttgaggcatatttgatcatctcggcgcttctgatatccgtttggtatatcgggatttgaaacggacggaagagctcctccagcgtatttgctgttttctcatcggccgtcccgatcacgatcctgtcaccatgaaaggtatcatagatcgccgacccctcacgcaaaaattccggattggatgcaaccgaaatactgacaggctccgctagatgttcagtgatcagtccattaatcaaatcgtttgtcccaacgggcactgtgcttttcgttaccacgactgtatctcgtttgacatgctttgcgatgcgtttggccgcatctgtaatttgctccagattggcgtgcccgtcgcttttctgcggtgtgccgaccgctataaaaatgatgtctgcctgtgccaagcctttctcatagctcgtttcaaagttcagccgtccatcagctgtattttttctcatcagctcttcaagacctggttcaaatatgggggaaatgccctttctcatttcatcaatcttgtgagcgtcaatatcaatgcaggttacatgatgtccaatctcagaaagagaaacacctgtcacaagaccgacatagcctgttccgatgactgttatattcattgtttccctccaacagttaaattgctgctttgcagcttccgtaatatcgtatgagaacatcctatcatgaatgcgaatgatctcccgcatagcctgtcgggtacagcctgtacagatttctgaaatgtgattcaatcatacaatacactattatatcgctctcaaaaagaaagtggtgaaatgagaatcggctgttaaaaaagaccaaacaattttcttcttttgaccggttgcggaggctgtctgaagatggtctgattccgcaggagaagctctgcattttccgtcagcatataaggaagttccgagccgaattctttctctagaacataaagggcctcttgagtgtgaaaatttctcgttttcacattatgggcatctgaggctacgaaatggatcaaattggcttcaaccagccggagagaaaatgctttcagctgcttgccgaaggtccccgcaagacttcctgaagtaatctgagatgctgctcctttttccacaagatgatacagcaaggacgggttttcgcgaatttccctgttgcgttcaggatgggcgataaccggaatatatcctttcagctgcaaatcataaaaaagctgctccgcatatcggggaacgtgatcaaacggaaactcaatcaagatgtgttttgtatcattcagcgaaagcagctgctgtttggcaaggtcttgttccacctcgccgtagattctgatttcctgtcccggaagcacatgtaaaggaatgtcttctttgattaaacgtttgtttaactgatctgctgcttctctgactgcagctggctcgtttttatacacaccgttgttatgatgaggtgtcgcaatgatcgtccggattccctgacgaacagcggctcttgccatttctatgctgtcggccgaatcacctgccccgtcatccattgcgggaagaatgtgacagtgaatatcgatcatgtcctagcccccttttttcgcaaaaataaataacgggcacgatgcacgttatttattttgcatgaaattgtccttgtttccgtaatatccgtattcagagtgcttcgaaagctttttgccgttcataatcgccccaagaagcttgcttttgcacgtttcaagcgcctctttcgcttttgcggcttgttctttttctgttttcccgcttgaaataaccagaacagaaccgtctgccacgttgcctaaaatctgtgcatctgctacggcaagaataggcggcgtatcaaaaatgaccatatcatatgccgcacacgcttcgtatgcaagctccttcatccacttcgaggagagaagctcggccgggtttggcgggatcgggccgctcgtcagcacgtcaagatgtttttcattcgatgcctgtacagcctgctccatagagcttttctttaataaaacagatgttaagccaaccgtattttcaagaaaaaaggccgtatgtactgttggttttcgcaaatcagcatcaatcaggagcactttttttccctgctgggcgaatacgacagccaggttggcggccgttgttgattttccttctccgggacaagccgatgtgatcatcactgatttcatctggcggtccactgaagcaaattctatattcgtgcgaatcgtccgatattgttcagagttcaaggatttcggctctgtcattgcaatgacatttctccgcatccgcgagtctctgctttttctaagcgccaaaatgtccactccccgttttttcagattggaaaccctgtaaggtctttgctgttttctgctcattcgcaatggtggaaactgtccctaaaacaggtatgtccagcaaggattcgagctgctcttccgatttgatcgtattatccaaatgctcgagcaggaaggccagtccgatgcttcccgccaatccggctgcaaacgcgatggcaatgtttagtagcggctttggcgatacaggggacggatgttctgaaacctcggcttttgacagaatgctgacattgtcaacattcataatggatgtgattttgtcttgaaaaacagatgctatagtattggcaatatgagccgctgtttccgcgttttcatccctgactgatatgttgaccacttgggagtcctgttcgctggatacggtaattttgtcattcagttcttgggatgtcatcgacaggcccatttctttaatgacttcatctaagatggcaggacttttaatgatgacattgtacgtattgattaactgaagattggtttggacatcgttaaattgaacttcttttcgttcatttttcgattggttgaccagaatctgagttgaattttcatagatgggtgtaagtgcgaagaaactaatgagtccgccggcagcagtggcagctgcggttacaatcataatcaaaagtatgcgttttgttaacgttgataatatctcttttaagcttgtagattctcccatgatacctccaaatctcttataacatccttttccatctacgattatacaacgttgaaaccgcatttctccagcttttcacgtgacataattcgacatttttttacaaaacgaaatgttactcttttttatgtaagcgctatatttactgtgttgacagcgctgtctcattttctcttattcgtgcagtcacgtaacctcgcataaaaaaatcccgcaaaaggcgtgcgggatttttatgttgcatatccatttttaatatgagaaatcaaattttcaagcatttccttcgtcgtcatctcagatgactgctcaccaatttcatgtgcatgcatcaaaattttcagaaattcttcttgattcaatttcttttcactcatcttttttttcctttcagcttccattaagttgaaaacacgattattatatgatgctggttatcaatttgcaatctctaatacatcattcgacacatcccattttttatgtccttttttaggaaaaactttttaaggccgatgtgttgcgatataatagagaaattggatctttttattacgtgactcggttaggagcgataatcatgcttcagaatatgatttccaaagacgatgtgctggcatctgctgaacagttaaaagaacttcttccttacaatgaggaaaatgttcagctgatcaaaaaagcccttattttatatcggcaggattcagtctatcgtttacaagcagtgagtccgacggaagttacggcttacgtgcaggatgttgtgcctgtgcgggtcacattgaacttgtttgtcatagtcaaaagcggctgttcatgtccgtccggaagaatctgccgccatatgctggctgtgtttttatatgtatatgcaatgttcgagcgagtgggtacttttacagagcattggctggagagggaaaagcttgaggaaagcaaagagctcgtccgccgccagtttcaggaaaaggtgctgcctaatgaagaatcgctttcaagctggcttgctttttttgattcagagttttctctctggcaggcacgtacgccagaaggcagccaaaacatgcagggcctctattacggctacctgtccgcattaaaaaaacatgcgccgaacaagccggagctgaaaagcctgtatcagattcattccgcgattgcggtttggcttcgcatgttcacattgattgaagcgggcaagctgaaccccgaacaagatttttattccctcaatccgtacgttgaacagctgatggatacaatctacagctctattgacaaattaaaaacgtacgcgctgtcttttgcgcttgatccgtttttggataaaacaccggatgttatccgacctttgctgttgaaagaagaaattttccaatatgaacgcatccgcgtcttcggtgaaatttggagtgcgctgttgtcgcggccaaaatgggtggcacgcgaacaggagatattgaaaaaagaagctggacggcgtttttctcccgaattgcaattcgggcgcctgcatttggaattcctgcaaaagaatgatgacgttatttttgcggaagcggatcaattcccgccggaagcgctcccttatacgttccaatggctgagtgaaatgactgccaagaaggactggaaacggcttaaaacatggtaccagcaaattgagccaattgcgatgggttatacgaagctggataagccgtttaaagagattcgcgatgtgatcggcgagctgttccttctgttgaatgcctatgtgcagcaaaccaatgatcaagcgctgtttgagcgctttgccgcgggctgtctgccgtatacgttcacagaatacagccatcatttatatgaaaaaaaacgctatgccgagtggattgaaattcatagccttgtcggcttttccatcaatgaaatggataaaatgatgctcaaggaaattgcagcgagcgaccctgaggcgcttataccggcttaccatagagaagtggcttttttcattgatcagaagaaccgcagctcgtacaaggaagccgcccggtatttgaaaaaattgcgcaccctgtacaaaaaagcgaaaaagcagaaggtgtgggagcggtatattcagctgctgagctcgcattacaagcgcctgcgtgcgcttcaagaagaactgcagaaaggaaagttgattgatggcgagtcttaaagaaattctcatccacgtcgaacaaatggaagatgggtcatttacgctctcagcctttgatgaaaatgagcagcctcttccctacagccatatgaaaaagcatttgttccaatggcatgaatcctcattttacggaacctttctagaggatgtcagcttcatcgggacgactgctgtcctgctatcgccatggatgactgtagagcttctcggcaaaaactcgttcaactcattcagctccgtgcagcttacagaagaaacggagccgctgatcgaggcggcatcgaccatctatgaatttatcgcggacggcgattttctgcctgactatgacgcatggacaaacggtgtttttcgctggaaagaccgcgataatatactggaaggctttactgcggaatggttttccgctgccgtacaggattacatccagtacgacgatgacctgcgggagaaatgggaacatatcaaggaaaaatcgcctgcggttacgacattccgcggccattttcttgatgaagaggattttctggaaggcattggctggattgacgatcaatctccatttactgtcggcttgcgcttaaatgaaccggactttgacggagacgaatggaagatcgagatgtttttacgcgataaaaagagcggcgctgtagaattctttgacggactgaagagcctcaaaaaatcgtggcaggcgtacagcgataaaatcgcgcgtgagcaggaccgctttcacagaacggttccgtggctgtcgtttgattccgggacaacgctgatctcggaggaagaagcctggatcttcctgtcagaagcaagtgagacgcttgtcgatatgggggtagaaatcctcctgccgtcctggtggcagattgtcagagacagcaacatgatgctgaaagcaaaggtgtcgtcctccccgcgcggcgagtcatttgtcggcatgaatgcactgcttgatttcaactggcggttcgcgacaaatggaattgaactgactgaggctgaatttaatgagcttgtcgccagcaacaggcgccttgttaatatccgcgggcaatgggttaaaatcgatccgcagtttatcaaacagatgaaacgcctgatggaaaaagcagaatcagagggactccacatgtctgatattctggcgcgcgagctaatggatcagcaggatggcggacttgaggattcggacctgattgatacatctgcttttgccggcattcagtttgatctgtctaaacagctcaggtcactgattcgaaagctcactgccgcggaaaacctgccggagcacgaagtcagtccttctttcaaaggaacgctccgcccttatcagaaatacggcatgaactggctgctgtttctgcgggaaagcggttttggcgcctgtctagctgacgatatggggcttgggaaaacgattcaaatgatcgcctatttccttcacgtgaaggaaagcggccggcaaaaaacgcctcatttgattattgcgccgacatccgtacttggcaactggcagcgggagcttcaaacctttgcccctgatctgtctgtcgcgctccattatgggccgcgccggccaaagggtgatgatttcgccgcgcattatgaaaacgcagacgtggtgctcacttcatacggtctgtcacatgccgatactgaagagctttcttctgtgacatggaacacgatctgccttgatgaagcgcaaaatattaaaaacgcgcatacgaagcaatcacgcgcaatcaggaagctgaagggtcttcatcatatcgcgctgagcggcacgccgatggaaaaccgcctgactgagctgtggtccatttttgacttcatgaataaaggctacctcggcagtttgaccggcttccataaacgctatgtgctgccgatcgaaaaagaccgggacgaaaagagaatcggacagcttcagcaattaatccggccattccttctccgccggacgaaacgggatgaagaggtcgcgcttaatcttcctgagaagctggaagaaaaagaatttatcccgctgtcagccgagcaggcatccctttatgagcagctcgtcaaagacacttttgaccatatgacgtccctgaccggcatgcagcgaaaagcgctgatcctcagcatgcttggacggctcaagcaaatatgcgatcatcccgcgctttacttaaaggaagagcaaaccgagctgctggccggcagatcagtcaagctcgaaaaattgctggaactgatgacagcgatccgcgcccaaaacgaaagctgcctgattttcacgcaatacattcagatggggaacatgatgaagcggctgcttgaaaaaacgttcggggaacctgtgcaatttttaaatgggagtctctccaagcaagagcgggatacactcgttgagaaatttcaaaggaaagaatatccgacactgattctctcactcaaagctggaggcaccggacttaatttgaccgccgccaatcacgtcatccattatgacagatggtggaacccggcggttgaaaatcaagcgactgaccgtgcataccgcataggccaggagcgctttgtccacgttcataaaatgattacgacgggaacaatcgaagaaaaaattgatgtcatgcttgaatccaagcaaaccctgaacgatcaaattatccaaagtgaaaactggattaccgagctttccacacaggagcttgaagaactgtttacattaagcgctacagcgcaatgatcatgactaaaaaagctggctctgatagagccagcttttttccgttcatagccgtcacgccgaatctccaaaaaatccgttacgccggttatatcaacaggatgcgcttttggagcagcacatatacctacagcaaatgtttcatcatatgtgcgacaccatgttcgtcattggttaaggtgacagcatcggctatcgatttgatgtcttcccgggcattgcccatcgctacaccttttcccgcagcctccagcatcgatttgtcatttaaactgtcacctacagcagcggtttcctcgagcggaatattcagctgttttgcaagcctcttcagcgcctgccccttggaagctttgcgggaagaaagctcaaagttgtgctcagccgaactgacaagcgtcaaatcttcggcatgctcatatcttttccagcctgcctcaagcttttctttgaagaaagaaaagccgagaatattgtaaaaatcgattggctgatcggcttcaaacagctcttgaaaagagttaatgtaagcaaagcccgattggctgtattgcacctcggccgcctgcttaaggacagaaagatccgcttccgggtttgcgcttctgaatctgtccagctcaacatcaagaagttctctgccgttttgcggtgtataaatcgctgaacctgtgaatacctcataataatagttttccgactcaagccatgagagaatatcatacgcccgtttcttatcaatcgtttcgtgatgataaagcctgccgtcgggatcgtgaatgacggcgccgtttgcactgatgacccatgttttgatccccagcggttcaaagattgacatgacgtcaaaatgagcgcgcccagttgacaccaccacttcaatgccatcccgctgcgcctgccgcagtgcgttttcattttccaagcttacctgatgcttgctgttgagtaaggttccatctaaatcaatcgcaattaatttcacgtttgtcagtcctttccttcatcctgctctgtcacgagaagctcaacgccgtttcggtcaagcaagtcacaaaatgcctgattcggcagcctgtctgtaatcaaaaggtcgatttcattcagctccgcatactgataaaaactggtgctgcccagcttcgaatgatctgcaagcgcgatgacctgctttgcctgctgtatcattttccgcttcaccatgccatcctcttcatgcgcaattgtaatgccatgttcggaaataccgaccacaccaatcagcgctttatcaacatggtagcttgagagcttttcaatcacagaggacccgtacagaaagcggtgctccttttccagcttgcctcccagcagataaatttcaattccctctttatcggacagcacatccgcaagattaatcgaattggtgattaccgtacaatcaaccgcattcaaatgctttgcacatgcttgaacagttgtagaggcgtctaaaatcacccggtcaccatcatgaataagcgatgctgcaagcctgccgatcttatttttttcctcagacactgttttcaggcggccggaatagctttgaattttctgatgcacagtcggcaaaatggcgccgcctcttgtgcggatgatggcattctgttcctcaagtttcacaagatctcgtcgcgctgtatcccttgacacttgcaggagcgtacagatctgttccgttgtaattcggttatgctgttttaaaaaatccaaaatcgctactaatctttcttcttggtacacgccctcattccttttctcagcaatcatttataagtaattataagtttttatttaattctattcaacattaataagtgattttaagtaaaaatacgtcgagagaaccaatttttcctaagtggacaaaaagaaagaaccagtctggtcgactggtcaattttgaggggatgatgcgaagattcggataatggtgaatggatagataacgggaggagcaaggggtgtcaatcagcagctttttcccggggtttagggtccataaaacgaacagtgtcagccaacacttctgttacatacacgttaacgccttccgcgttttcatagcttcttgtctgaatccgtccgcttactccgacgagagaacctttttggcaatacaacgccgtgttttcagctgtttttctccaaagtgtgcaattgacgtaatcagcttcgatttcacctgaagcattcttgaaactgcggttcaccgcgagcgtaacatgtgcaactgccgcaccggcggaagtgtagcgaagatcaggatcttttgtaagacgtccgacaagcatgacctgattgaacatgcgattcctcctctccttgcggttgtatgtattgtaaatgatgcaacaagaaaagaaaaacgcttaaaaatggctttcagcctctgtttttatctttcgttttcatttttccttcagctaaaaacatcttttgctttttccctttgaagaaatatgtactttttaaaaaacggaaaaagatttgctttgtcagccagttttgcgtattcatgcgcacataggaagagccatcccacgcaaaccactgaaagctcaattttttttccggcattgacagcttgattttatactgctccatgccatcttgtgtttcgtataaaaaacttattcttccttttttgttcagatgaacctcaaacacttctttacggcttaacatatatgttacttccttttgaatcaaatggctttcagaaggagcgccgtcaatataaatttcttttaaacgaaattgattcataccacatctctccgtaatccatagtcagttacagtataatgaaaaaatagaaattattaaatgtttcgctcatacaaaattctttagccccagcattgcaggattttttcctcgaaaacgtttatgttataatggaaggcaagaaaactttggaagtaatcggggtgagaagaaatgaaaacctttaaactggttgacctgaatgtggaacgagtggacaaggaagaacaatcaatcgaacagtttccccttattgacggactgattataaataaagaagacggtgaaaatcactggctgattgaggcgcttgtacagaaagaacatctgtctttttttgaacagcttcaaaacagccaatctgaagccaaagtatttgtaacgatcacgaaaaaaagcaatcgccccgcccagctgacagcagcagtgaaaaatatcgtcaagctggaagaaagcatccaggttttactctatggacaaatggtaacaagaaaacagcagggcactgaaaccattctcgagtcccttgtaaaagagggctatacaggaacaaaactcattgaggcatttaaacaaaagttataaatatgagggggcatgttccccaaaacagacacagaaccgaagagcatcacaatagacatttagaatagatatgttctgcatgaaaaaagctgccgttttgaacggcagcttttctcttcgtgctttcactcttgcatatttaatttgtatggccaaaagaatcaaccaattcccctttcacaacaaggcgcccttcagttttgacagccttgtcacatgtgattagcgtaatctcttttttgtttgtctcctcaactacatctgcatccgtttccgatatgatgtctttagatgttacagaatagatataatcctttttaaaatccgtgatgacaatttgggcacctgtttttatattctccagaggtccgaacagaagattcttttgcttcaaatgatggcccgccaacggataatttccctcacccattttttgatccgggcgcattgttgccgcccctatcaaaagattttcattggttgtgccttttacgatcggaagctccagatcgacacttttaattgttatctgccgccttgattgtgaagtaaaaataagtatatttcacgtgctttcgacgttctccacttgactggaatgctttaatggcgatcccggcatctgtagcttcaggctttccttcagaggaatcagaaatctcaaactctattttctcagtgttcagcacataaccggctggcgctttcgtttcaacaaaagcgtattgtcccggtgcaaggcctgaagctgtgactttatgatgccggatatgactggtttcgaagtctgtatgaaaattcgcgaacgattcagcatggtggatcttccggttctgatcattacagctgccattatcggccatgacaaatacaaggcttttcatgccggagcgaatgacattttgcaaaaaccttatcattactctgaatttatggcgcgtattcaaaacctgatcatgatgaaacatacagcaaatcaagccacaagaatggaaatggcgtttctccagtcgcaaatcaagcctcattttctttataatgtattaaacacgattatttctctcactcatttggatattgaaaaggcccgggaggtaacagaggaatttaccaactatttaagaatgagttttgactttcaaaatacatcagccatcagttccttcagacatgagctttcgattatcaattcctatctttctatagaaaagacgcgattcggtaatcggcttgaggttcttttcgatatagatgaagacattgactttatccttccgcctttaatgattcagcccttggtggaaaatgccgttcttcacggtgtcagcaagaaaagaggcggaggatggatcaaactgacagctaaaaaacaaagcaaaaatgagtatcacatcaaagtagaggataacggtgcggggatgcctccggaaaaacaaaaagatctcttatctgcggatttcgatcgcagcgtcgggttgaaaaatatcaatcagcggctgaaacatttttgcggaagcgagttgatgatcatcagcactccggatgcaggcacctctgtctcaatgctcattcatctcgctgaaacaacagaaagccccgcgggactgaaggacatagaacgaacctaaacgaaaattgagataaaaaaaagacgccgtttataacggcatcttttttattccggcgactttgcttgctgcttcagcaggtctctgatttctttcagcagctcctcctgcgcatccaccgcttcctccgcagcctcttcttctgctgcttcttttttgcgccttaacccattcaaagtccgaatgacgataaaaatggagaacgatataattaagaagttcacaatcgtctgtataaagctgccatacttcactacagcatcgccaaacgtaaacgacaggcctgaaaagtcaagccctcccagcagcaaaccgaccaaaggcataatgatatcatttactagagatgtgacgatctttccgaaagcgccgcctatcacaacaccaatcgcaaggtctacgatattcccccgcatggcaaaggctttaaattcattccacatacaatcacctgcttttctatatttgtaaagaaaaaaagacaaatgtgccgctggccatctgccttttttcaattattctccgagggcaaaagtcagttctacttcgcaaacgacttcgccatcaactgtggcaacgccttttccgcgcccgattgtgccgcgggcacgaatgatttcaacctcaaggtgaagctggtcaccaggcttgacttgttttttaaagcggcagttatcaatgcctgcaaaaaaagccagtctgccgcggttttcttctttaatcaacatcgcaacagctccgacttgagcgagtgcttctacgattaatacgccgggcataaccgggtactgaggaaaatgtccgttaaagaactcttcattagcggttacatttttatagccttttgcccgtttgccctcttcaacttccgtaatccgatccacaagcaaaaacggataacggtgaggaataatttctttaatttgctgagtatcaagcattgtcttgacatctccttcatctgcattagtatgtatagcaatcatcaaagatccaatctgtacatttgaaaagtatattatgaattaatctctttttcaaccgcgctaaaatgtaaccaactgtcaatgagagccgtcaaaagttatgatatgataattatagattttaccaatagcaaagaggtaggaaaatgatttcgaagtttattgaaaaaagaatgctaaacatgttagacgagtggtattccgcaatgagcaaacgcaaaatgaatcacgtttgcacactgaaagagaaaattgaccagcaccttccaaagatcaaaaagaacacaaaactttggatgcgttatcaattgtttcaggcccgccatcagctgctttttgaaaaccagaacggactcgattcattgttcgatgacctatatggcctggaagacaaaatggatgatgaattgaaatattatctgtattttttctctgggttatatgagatggtaaaaacagctccgaaacatgcagtacatcattttaaaaaagctgaacagtacctggccgccattcaaaatacgtttgaagccgctgatttatattatcaaaccgccggcgcctattacttgatgaaatcaccgccgctttccatccaatacgtcaaaaaagcattacacatctatttgcaccaattcggctatatcaaaaaggtaatcacctgtaaacttttgctcgccgtgaattatattgatcaagaacgctatgaaaaagctgaacagcttttcaaagaaatcattaagaaaacccagcaactacatgacgaaaacctgctatgccacgcttattataaccttggctttttaaaagcgaccgagaaaaaagaccaggaagcgcttctttactttagaaaagtattaaagaatcaagaatttgaaatgaattcaccagtctcatatcttcattgtgtgtacgagtctgtcagagcgctttttaaaacaggaaacatcacagaagctaaagccgtccttcaaaaaggaaaagaattatctgaaaaggtagacattcaaaccatttatttaaaattaaaaacgcttgaagccctctacacctcagtggaagatccctatgagcagctgctcgaatatgtgcttgaattagaaaaaatcgaggcgtgggtggatttagaagtgctgttagaagatattacggaatactacaaaaaaaaggacgatttcgaaaaagccgctttttttatcatgcgcggctgattgaaaaacgcccattttcttattatctgactgaattgattaaaccgagcatttgatctcccattgtgatcgttctgctgttcagctgatatgaacgctgggacgtgatcaaatctgtcatttgttctgaaatatcgacattggacatctcaagtgagccctgctgcatgccgatgttttgtctattagcgccgtttagctcttcaaaagctgccgcattatcaatagagaaaaggttattcccttcggatttcagctcttgagggttattcacttggacaacgccaagattaaaccgctgaaccgcgtttccgtcagatgcggttaaggtgccgttcttattgatggtgatattcttcattgagctgtcgatgttcactgtattgccgttctcatcaagtacgggatacccatttccagtgacgagctgcagctggttggcattcgcagcggacggcgttacatacagcgccccgtccctcgtatactggcggtttccatttacatttacctgaagatactggtatggagacgtaaatgcgatatccagatcgcgatcggtcttctgaatgcttccttgatcagagaccaggcgtgaattcatcatcgctccgacgccaaggcgtaagccgggcggcgttttgcgggcttttgccacttcctcgtttttttcatcaacctgatcgaattgctgtctgacaagctcagaaaaattcgtatcttttgccttatagccggttgtgttgctgtttgaaaggttgctgctgattgtgtcaatctgctgctgcagctggtttaaggttgttgatgccgttagcattgacctgagcatagttgatgtcccccgttttttcttccgttatcttaaatttttccaatttcatttgctgctttatccatacttttatcgtaagcctgaataaccttctgattcgcctcaaacgatctgtacgcttcagtcatttctgtataggcgcttgtcacatccacgtttgaaagctctgagacgccttgttttaatgaataggatacctgattgtttccggctgcgcttggcagatcattaccgtccgccgtgctgtacaaatcatttccgtcccgtttgagagtgcggacatcttccgccattctgacatcaatctggccggctgtgcgtccgttcgttgtcacagtaccgttttcagacacagtaaaattctcattatcaacagtgattggctggcgatccgtcgataaaatagggcgtccgttgatcgtcagctggttgttctcatttagtgaaaatgtgctgctttttgaataacggattccatccgctgtttgaaccggataaaaaagagcagctttttcattggtttccgcattcatcggaacttgattttcgatcaatgcaatgtctgtaggctgatctgtggacttcaggcttccctgtgtgaagagaggcttgagctcctgcatatacactccggtattcacggaaccgatttccgtcctcgatgtcccggccggagattttgattctattctgctgagcagcatttcagggaacgcgcgcatcgagccttgatcagctttatatcctgatgtatttgcgttagcaatattatttgaaagcatttccgttcttcgctgctgggcaatcattgcggatgttgctgtatataatccttttaacaaatttcccacctctaaaaatggcattttttccagttgtcatataggaacgttcgttctataataaaaactcagtattttatcctattatcgtcatttaacatcttttcgtgaaggctttttcataaaaaaacctcattctttttcagaatgaggtttgtgaaatcagcttagtttgcgtttaggaagcttgtccatattatcaagcatgacacctgtgccgatggctacgcaatccataggattttcagcaacgaggaccggtaccttcagctcttcagcaagcagctggtcaaggccgtttaagagcgcgcctccgccggtaataataacgccgcggtcaataatatcagcagaaagttcaggcggtgttctttcgagcacttgttttgcagcctgaacaataacagcgacagattcacgaagggcttcttcaacttctttactgtttactgtaattgttcttggaagaccggaaaccatgtcccgtccgcgaatggaaatttcctcgtgacgtgcgtctgggaaaacagttgcgactttaatcttaatatcctccgcagtacgttcgccgatcagcagcttgtactcgcgtttgatataatttaagatttccatgtcaaacttgtccccagccattttaatagaagaggaggtgacaatatcgcccattgaaataaccgcgatatccgtcgtcccgcctccgatgtctacaaccatgttaccgcttggctggaatatttccatacccgcgccgatagcggcaactttaggttcttcttcaaggtacacatgtttcccgccgcttttttctgcagcttctttaattgctttttgctcaacggatgtaatattcgtcgggcagcaaatgagcatgcgcggctttgagaacaggccttttacattcagcttgttaataaaatgtttcagcattgcttctgttacttcaaagtcagcaataactccgtctttcagcgggcgaatcgcaacaatattcccaggtgtacgtccaaccattcgtcttgcctcttcgccaaccgccagcactttgccgctgtttttatcaagtgcaacaacggaaggttcattcagaacaattcctttacctttaacatggatcagtacatttgcagtaccgaggtcaataccaatatcccttgcaaacatctatttatatcctccttgaaaatctgtttcacagtaaatatccacattgtgccctaattatatatattatcataaaatatagaaaaaaagttggaagcacaataagttctttacaaatttttgcggatgttttatgaacgatttcaagaaggcaatgccaggtgattacgattgctgaacaggctctccttcgagaatttcatcttttttatatttgagctttgtcgcttctcctcctcttaaatgcctgatggatttatgataatcgagtatttctttcacttcgtttgccaagtcggggttaatttcaggcagacgctctgttaaatccttgtgtactgtacttttggaaacaccaaattccttcgcaatgacacgaacggttttctttgtctccacgatgtacttccctatcttgattgttcgctctttgatgtaatcgtgcacaccactcgacctccctaaaatggatgtgagaagtgtgaaatgagatccgtattctgtaaagagtcgttcattatgccgcttcttcgttgtatggttttaaaagtaagtttgtgaaatatgcccacgatccctcacctcaaacactctctttgttaggtttgtaacagtgtattagcattcttttgggaatatgctaaaaactcaataaggacaaggggtgaaacgaactttttcagattcagcaaactatttcgcgtcactaaattttcatctttacaactattgatcgctcctgtaaaatgaaataagcaattagttacttaggtaagttttttagaaggagaccgacatgtcctacgtcaacagacacctcattcatcaaatcaaccaaagcgcccgcctgattgccaagaaagccaatgaacagctagagccattcggcctttattcatctcaatggtcagttttatattgtttgcgtacgatcggaccaatgactcaaaaagagatttggtcctatttaaatgtggaagcgccgactgtgactcggacgatcaaacgcctggaggagaacggctgggttcagagacggcaaggtgaagacaaacgggaaaaacttgttgtcctcacaaaagaagccgagaaaaaatacgaagaaatcaatgtgaaaatgttgaaattcgaggaagagctgcttgcagatttccgggatgaagataaagaagctttttctcatttattccgcatgtttttacaacaatgaaaataaggaagtgacatacacttgaaaaaagcggatgcgatatggaccaaggattttattatggtcctgcttgtcaatttatttgtgtttgtgttcttttatacatttttaactgtattgccgatctatacactgcaagagcttggcggcacagaatcacaaggcgggcttttaatcagcctgttccttctgtctgcgatcattacacggcctttctccggagccatcgttgagcgtttcgggaagaaaagaatggcgattgtatcaatggcgctcttcgccctatcatcttttctgtatatgccgattcataacttttccctgctgctcggattgcggttcttccaaggaatttggttcagcattttaacgactgttacaggtgcaattgccgctgatattattccagccaaacggcgcggtgaagggcttggatactttgccatgtctatgaacctcgcaatggcgatcggacctttccttggtctgaatttgatgagagtggtaagctttcctgtattctttacagcctttgcgctgtttatggttgcgggcttacttgtttcgttcttgataaaagtgccgcaaagtaaggacagcggtacgactgtattccgttttgcgttctcggatatgtttgaaaagggcgcactcaaaattgcgacggtcggtttgtttatttctttctgttattcaacagtcacatcatatctgtctgtattcgccaaatcagttgacctttcggatatcagcggatatttctttgtttgttttgcggtgacaatgatgattgcacgcccgttcacagggaaattgttcgacaaagtcggaccgggcattgtcatttatccatcaatcctgtttttctctgtcggactctgcatgctgtccttcacacatagcggcttaatgcttctgctttcaggggcggttatcggtcttggctacggatcaatcgttccttgcatgcaaacattggcgattcagaaatctccggctcaccgctccggttttgcgacggcaacgttctttaccttctttgacagcggaattgctgtaggatcgtatgtattcggattgtttgtagcatctgccggcttctctgccatttatttaacagcggggctgttcgttttaattgctctgcttctctacacgtggagccagaaaaaacctgcagaggctgaaggaaaagtgtctattgcagaataacttgtcagactgccgggaaatcccggcagtcttttttccattaaaacacggcgccctctcggttgaacgagagaacgccgcttatagcaattattcaatgacaggccgcgcaggtgaatcaggatctaacgaaaaatcataggacgcttcatcacgaaacatcggatcggcatatatggattgttgatcgttttttgttgcttttcgatacgaagaaaatgaatcatattctttctttttccacatccatatgccgtcttgatccgcttccttgtggtacacgttatgattgaccgtattaccttcgttttctgtaaagtcgtttccgataaataatctggaatcaccggccgtcaatatattcttttcaattgtgttgtttttcgtatcgtactgcagcagcagctgtccgccgtacagtccctttgtgtcattccggtacataatattgcgggcaatcagagaattgctggtgccgccccgctttttgtcatatcctccgattgaaataccggtgtacgcattgttgtacactttgttgtctgtgatctgaatggcatttgcatactttcctttgtgttcagacgttgcttcaatcccaatatcgttatcgtaaactgtgttgttcttaatttcgatatcgtgtcctccatcgacataaatcccgcccgctgagtattcatctccataagcaggattgccgtaagtcgagttttgataaactgtattgttttctacgactccgtttcgcacgtaatcgtttttatccgcggttccctcataaccaattagatcaatcccgatgttattattgttgcggaccacattgcctgcaactgtgaagccgtcgatattaccgttcagcacaactgcttcactcgctccaagcgtcagtttctcaactgtattgtcctcgattcggatgtctttcatgctgccagtcccataaactgcgattccgtgagcatttccttcatccgctgttgtcttaatcccccggatgtgattatccttaatggcgatatgactgctggaccctgatacataaatccctatagcagttgcttcctcagatgaaacagaaagatcttgaattgttaaaccgctgatggcaatgtcatgtttatcgtgaatacgaataagcggtgtttcatattcagcgttcgcaacggattcaccgctaatcacgacgttttcattttcatagtttcggaatgtgataggctttccgtccgtaccgctgtgctttacatcaagggtctcatgatacgtgccctcccgaatcatgacagttgtgccggcagcagccttctcagatgcgtgtgccaatgtacgaaacggcttttcttttgttccttcattttgatcactgccatttggcgaaacatacagataatccccagatccttcctcattcgcttttgtcttatcataaacgaaagcgaggatgacagacgttaaaacacccgccaaaagaataaaataccattttctcattttcgattcccatttcgttttagaatagatttctaaaaccattataaatgttctatttatggaaaaccatttcaaaaatatgaaaatataccgtctaaatagatcttattcagcctggcggacctgcgcatgttcaactgtttcaattgccaatgatgcaggcgggtgaacacgcatcagaacaatgtagaaaagaaaggaaatcagcacacctacaaaccaagaaatatcgtataagctcttcaatacaggaacatacatgccaatcagcgaaatcagcgctcctaacattgtggctgcaaacgcacggtaattgtagcccttccaatacacataccgtcctgtttcggaatacaggtcatctaccgagagctcacgtttgcgaatgataaaatagtcggccatcatcacgcctgccaccggtccaagcatgccgcctattaagccaagaaacgcatacacgcttgtcgcgctctccatcagcttccacggaaccgtaaataaagcgagcaacgctgtgataaagctgccacgtttgaaattgatatatttcggcagggcattcgctatatcataagcgggtgatacgatattcgccgcgacatttacagagatcgtggcgatgcagagtgtgatcacggacaagacgatgacataagggttatcaaaccgcgccaaaatatcgacaacatcccaaatcggctctccgaacgcgacctgcgagccggaggtcaccgtaatacttgcgaatgcgaacagcgcaaacgttcccggcaaaccgtaaaattgtcctttgatttgctctttttgtgtttcagcaaaccgtgtaaaatcaggtatatttaagatcaatgtcgcccagatgccgatgatgccagtaactccggcagcaaacggccagaatgtttctgaaaacgtatgaaactttcctggttgagagtatatcgggcccaatcctccagcaatatcaacggcccaccataccatgccgccaaataccagatacactaaaggccctgcccacacctcaaaacgtttaatcgactccatgccgtgatgcaatacgagtaaatgaatggcccaaaagaatacaaaggaaagcaaaccggacaagtgaatgccgagaatgttccactcgccgccaatttctccccaacctggccacatattcaaaagcaaaatgttcagtgccgtgctacccgcaaaggtctggatgccaagccacatgatagctgtaaacgcccttagaagcgcggggatattcgcgccgtatatcccgtaagaagcccgaatgatcactggaaacggcagcccgtattttgtccccgcatggccgtttaaggcaagagcgccaaataggataagtgatgccgtaataatgatcgccagcacctgccaaggcgaaaggccgatcgcaattaatcctcccacggtcgcgtaggtcggtatgttatgtatacatcccatccaaatggaggcaaagttcattgctttccacgtccgtttttcctgtcccaaaggcaccagatcttcattgctcagcctgttggattgctgctgactctcttttaatttcatagccggctcccctttccatattgtctatatgtcgtcacacgttatgttttttgacattagatgtcacttaatataactgaagagtcagacaataacactggctatgatatacaattttcccgtttgtatttgaacaacttaaacaagaaaaagagacagacctcagagcccgtctctttcttaagatgcagttttcattaatgcagcaaatctcacagccattaacaggcttgctccgcccgctataatcataatgattcccatcatatcaaaatgggctgccgtgatttctttaccaaaaagaatgccaaggatcaccgaagacaaaatcgatcctaggtaacggcaggtttgaaacaggcctgaagtcgttcctaccatgttggaaggactcgtttccagcatcgctgcctgaagcgcgacattgcccagtccgtagcctatacccaagagcgacagaatgaggcctttaccgatggtctggacattgataaaaaagatggttaagagcacggctccagccgtcatcaaaagcgctcccgcaaagatcggcttgacgacaccagatcggtcgatccatttgccggttagaggtgacacaacgatgctcattccagacataaacagcataaacaggccgctcgtttgaacagaaagatgcatttcatcctgaaagtaacttggcaaaccaaaaaataaacaatagaagaaaacattcaataaaataaactgaacatacacggctgacaggtttcgctgtgttttaaacagacggacatcaataaacggcttatccgttttcagctcgcgccagacaaacgcacagagcagaagcaagccaagcacaccttcaaccgcatgcggcgacgtgctgaacgacagcaaaaaggatagaaggaaaatgattcccccggcaaataaaacaattccaagaatatcgagctgccgaataatggttttgattcctgccccttttttctgatctttcgggaacatatacaggcccaataagaagctgaggataataaacggcaaattaacgataaagatcgccggccagcctccccatacaatcaaaaacccgccgactgtcggccccagcgccgtcatggcggacgcaaaaatagagagtacagccaaggctgaagcttggcgctcatgaatatgattccgaatcaagccgacacctgacggataaatcgcactgctccccaccgattgaaacagccgcatgaccaataatgtcataaacgtcggcgcaaacggcgccccgatggcagaaaccgcaacaagaataagcccgaataaaaacaagcgtttccgcccaatcaaatcaccgagctttcccgttacgggctgcgctacggcactcgccaagtaaaacgaggaaatcagccaggaaaccgttgtaaacgagaggtgaaactcatgctggatgctatggagcgcaagagagatcatagacgagttcagcggattcagcattgttcccgaagccacagctgttaaaaaaacagctcggctttttttcgataacatcatttcacttgttccagaaactcttccgttgtccgcgatttaccgattctcgggaaaataaagcgcagtgtggcttcatgctcttcatcgctaaatgtggacatggcatctgtaataaaaatctgctgatagccaagctgaaatgcctcccgtgctgtgctttccaccccgatattcgttgcgatgccgcacaatacaatcgtatcaatgccgcgacgtctcagctgcaagtctaaatctgtgccaaaaaaagcaccccattgccgttttgtcacagtataatcgccatcctgcacaccgatttccggaacaaattcggcccagtccgccggcatttcccctgaacctccctgcgcaggctcatccgtttgcggcttcagggcgtccgctccatcatgaaaggctacatttacaaagctgatgaacccgttatgtttccgaaattcatctacgagctttttcacgttcgggacaacctggccgctttgatcaatcggcacaatccccttttgtaaatcaatgataaccaatgctgttttttgaaaatcaatgttgagtgtattcatcatacgtctcctcctgatactgttagtgtttctcacattgcatattttactcttcacactgcctaagttcttttatgatgcttgtgaaattctcagaaggagcgttttctcatgatttttcttttatgtaatagtaacaggttgtgcatacgaacaaaccggcaagcacagtaatcataaggggcgtcatcacttcatcacctgcctgctgtctatcggttcctgcctgaaaatgcccatgaatttgcggcggtccatccaaagcaggataagacacataaccattaatatcgtgctaagatcctgcacgccaatgtcaaaacaatagttaatcaagacgatgttcacaataatgggcataaaaataaccgcccctaatgcagccgttcgcggaatcagtaataaaacagctgccaggatttcaccaaaacctataaacagttcatagacatgagaataaccgaaaaatgtccacgcgatcgtaaaccccttcccggcagccgcctcgatttcaggcgtcacctcgccaaactggccaattaccactttcgccagaccgtacacgaaaaaattaaaggctaaaaacaatcggaacgtcgcgggaatcgacttgcgtaccgctttcctcagcctgccgcctttcttcatcatacatccccctcagtgtattatttgatatagtacacttaatacagtatatagtattctaattaatgtcaattcccttttcagctcatatgaatagctgcttttatagatacaaagtcttatatcgtaaaaaatgtcgttctcctttctttccgtccctcgataacatttcttaaaaaccatgttaggaaatcttacacgaaaatgttttatcattcttttttctctataatgaagaaatataataattgctttttattctgaaagatacggaggaatgagacatgcaaatgggcgatacagtttttatgttcttttgcgctttactcgtgtggctgatgaccccgggattagcgttattttatggaggaatggtaaagagcaaaaatgtgctgagcactgccatgcacagtttctcttccattgccatcgtttccatcgtttgggtgctgttcggatatacacttgccttcgcaccaggcaattcaatcatcggcgggctggagtgggccggcctcaaaggggtcggatttgatccgggagaatacagcgataccatcccccactcgttatttatgatgttccaaatgacgttcgccgttctgactacagcgattatttccggggctttcgcagagcggatgcgattcggcgcttttcttttattctcggttttatgggcctctttggtttacacacccgtagcgcactgggtatggggcggcggctggatcggccagcttggagcgctcgattttgctggcggcaatgttgttcatatttcctccggtgtggcaggacttgttcttgccattgtgctcggcaaacggaaagacggtacagcgtcttctccgcataacctcatttacaccttcttaggaggagctttgatttggttcggctggttcggctttaacgtcggcagcgctttgactttagatggtgtagccatgtacgcgttcatcaacacaaacaccgcggctgcagccgggatcgccggctggatcttagtagaatggattattaacaaaaaaccgacaatgctcggagcggtatctggcgcaatcgccgggcttgtcgccattacgccggctgccggatttgtcacaccgttcgcttctattattatcggcatcatcggcggggcagtttgtttctggggagtattctcgcttaaaaagaaattcggatacgacgacgcgcttgacgcctttggcctgcacgggatcggcggcacatggggcggaatcgcaacaggattattcgcaacaacctctgttaactcagcgggcgcagatgggttattttacggtgatgcaagcttaatctggaaacaaatcgtcgccatcgccgccacttatgtttttgtatttattgtcactttcgttattattaaaattgtaagcctcttccttccccttcgcgcaactgaagaagaagagtcacttgggcttgacttaacgatgcacggggaaaaagcatatcaagattctatgtgaggagtgacgctatgagcggtcaaatgttcaaggtagaaattgtaacgcgtccggcaaattttgaaaagctgaagcaggaactcggaaaaatcggagtgacctctctgactttctccaatgtacacggctgcggccttcaaaaagcacatacggagctctatcgaggggtaaaaatagaaagcaatgtatacgagcgtttaaaaatagaaattgtggtcagcaaggttcctgttgatcaagtgacagagaccgctaaaagggtgctgaaaacgggatcacctggtgacggtaaaatatttgtctatgaaatcagcaatacgatcaacatccgcacaggcgaagaaggacctgaagcactttaatatcggtacgagattcggacactccggatctctttttttgtgcacagaatcccccccagaaaccgcgattcctcttcgaattctcttcaagcgccgttatttcagacaatctctatttttatttgaaacttttcatgagtaagattagtctactaaatataaaaatgtaaaaggtgattatttgaactacgaaatttttaaagcaatccatggactatctcatcacaattcagttctcgattccattatggtcttcatcacggaatatgccattgtcgcctatgcccttatcctattggcaatctggctgttcgggaacacacaaagcagaaaacatgtgctatacgcaggcatcacaggaattgcaggccttgtgatcaactatttgattacgcttgtttatgtcgaaccgcgcccgttcgttgcgcatacagtgcatacactgattccgcatgctgcggatgcttcatttccaagtgaccacacgacaggtgcattagcgatttctattgcgatgcttttcagaaaccgcaaaatcggctggccgcttgtcatttttgggcttttgacaggcttttcgagaatttgggtgggacatcactatccggtagatgtattgggcagcctcgttgtcgccatcattatcgggttccttttctttagattttcagatctgcttcgcccgttcgtcgatttggtcgtgaggatctacgaagccattatcaataaactgacgaaaaaaccaaccgatcaaaatttctaagaaagacaaaagccggcgtctgaaatcaagacagccggctttaatatttctcatacatctcttgttttcttcgcttcgccaacacatataaaccataaaacaacccaattccaacagcatcgatgagcacatcccggatacaaccattcctgctgaagaagagctgaagaacttctgtgaaaaaagcaaacgcaaatgagccggctgcagctgatcttatgctgccccgctgtttccacagcaaatatgtcagcacaaagaaggaaaacgcgtgtccgattttttgaataaacgcttcaggtacagtaagctcagtaaaatccataactaaaaattgagacagatcagggtgcggctgaaaatgaaaagccaccgtttgcgatacgaccatgccgctgaagctttccgtacagacagaaagcaggataaaaaagatccagcctgcgagcaataggcggttcatgacataacctcctttataacgtacgtgcctacatgtaactacatagacggtaaaacaaagcaaaaagtaacagaaaaaaacgcccatcacaaggatagacgttttcttcattaagactgttcagtgtcttctgttgtgctgctttctttagaaccagatttgtcagttgaatcatcctttttctcaccggatttttcttctgttcctttttcagttgatccgtcctttttctcggaagattgctgaatggattcttctgtttcttgggtggcagctttttcttcagcagctgctgctttttcaatagaagaaactggtttgtccataaagtttaacggattcattgcaaccccatctttacggatttcaaagtgcacgtggtttccgctgtcttcactgtaaaggttcttgccagattttccgatcacttgattttgttttactttgtcaccttgctcaacgcttacttcggaaagagattgatacacagtcgataaaccgtcggcatgttctacttccacaacatatcccagcactggatctttttcagctttaacaaccgtaccgctcagagaagcagagacatcgaaatcttttccgtctttctcagctaagtcaattcctttgcttaggctgtacgtgttattataggtaacgagtgctgcttctttctcttcttttgcggcatcggtttcatagaactttttcacaacagaaacgttttcagaatcaacaaccggcattgcgacattttccattgactttcctacttcaactgcatcgtcgttgttgtcatatgcggagtttccgccgttatcagccaactgatcctttacctcatcatttgatactgattgataccaaaggacagctgttaaaatgacggccgcactgactaagtaaattgcagggaacacccagcgtttacgaaaaaactgctgaagttttttgacttgagaagttttcttttcttcctctctcattgtttcatcacctcagcaacattctgaacacttttctgaaaatatatacaacctatccaaaaaaacttttttagatgtagtttgcacagactgaacgaaaatatgtatttttttgagaggagtgccaaaaacgtatgaacatgacattgcgtcttgctgaacatagagacttggaggctgttgtggcgatttataattcaacgattgcttctcgaatggtaacagccgataccgaaccggtaactcctgaagaccggatggaatggttttcgggacatacagagtcacgtccgctctatgtggccgaggatgaaaacggaaacgtcgctgcctggatcagctttgaaacattttatggaaggccagcctataataaaacagcggaagtcagcatatacattgacgaagcatgccgcggcaaaggtgttggatcatatttgcttcaagaagcgctccgcattgccccgaatcttggcatccgctcacttatggccttcattttcgggcataataaaccaagcctgaagctgtttgaaaagcacgggtttgcagaatggggactattccccggcatcgccgaaatggacgggaaaagatacgatttaaaaattttagggagagagctttcatgattagtctggataaagatgaaaacgaaattgaacatcataatgaagaaaatagccttgttgaacaggagactgcacctgttggacaggagagccgccagctgagcgcctccgctgtcaagtcgctatccgacattgccaagtggggcaaaatttctggcatcttgttaatcattatgggatcgcttgtcactctgtctgttttgatgacagtgattggcgccatcccgggcgtgctgctcattatatcaggcgtatttttgatgcgctcagcaaaagcagccgcggaagccgaaggaaatctagccggcagcgctggcgaaagcatgcttgaaaattacgggacatttataaaaatgcagctgttttatgcagcatccagtatcgttactgtcctgatcgggatcattgtagccattttcgtgctggtggtaatcggcattgctgcttttgagaacacgccttcgtatgatgatccggattcttattattatgaggatgatccggtgtttgaataatgatgagacaggacagggcatgagttccatataaacggaaccatgcctattttatttgactattcaaagcaggccggcgtaaacaccaaatcctgaagcaagtacaatagacatctctagtagaagaaatcaacaaagcaacgctgttacccagaaataaataacaaaaaaactacctatgaggtcggaatctatctgaaaccgcgctttttatttcgggtgtctgcatgcaaaaaaacacacccggatcgtctggaaaatctcaacaatccgggtgcagatcttctttaatacatttttttgcgtctgtcttcctcagtcaaaaattcaacaaaactccgcatcgcaaaaggctcttcctttatttgccgtgcgtaggagcttttccgctcttctgaaaggatttcgctctttttgatcctgttcagcatatagatgtgaactgttttttggatttgtttatgctgatagcctgcctctttaaaaaatgcgagcccgagcgccgccaaaagagcgaatatgcctgcgctgatcagggactccctgtcagctgaagcatgaaatagaaaagcagctaaattaaagagagagaatgcagcaagcggaatagcaagaaaacggtaaatgacggtttttttcatgaaaggctgtacggccttttgaattttttgcatttctgttttgatgaaccccggcatttgttcgactctgtaaaagttcatataatcctccccctttatttgatgtttcaagcttcacgaacgttacatatgtgtttattttaacgcaggtgcaagctggttttaaagaaatctgcccgtatttttcacgaagaatctggatcgccgctctttattcttttaaaatgtgagtgttataatttgtaatgggaatcagatcactgttattcatggaatactaatggcaatcttcttgataaatatgaatgagcggggttacaaagtgagtatttcttccatccttttatcactttttttcattttaaatattcttttggccatcattgtcatcttcaaagaacggcgcgatgccagtgcatcttgggcgtggctgcttgttcttttctttattcccgttttaggctttattttatacttattattcggccataatctcagacgcaagcatttgtttcaatgggaagaccggaaaaagattggaattgaaaggctgctgaagcatcagcttgaagatttagaaaccaagcaatttcagtttaacaaccgggcaacctttgataacaaagatttaatttatatgctgattatgaataaccatgctgtgtttacagaggataattcagttgacgtcattacagatggacgggataaatttcagcggctgctgagtgacatttcaaaggctaaggatcatatccatttacagtattatatttataaaggcgatgaattaggcaaaaaattgcgggacgctctcatccaaaaggcgaaagaaggtgttcaggtcagagtgctttatgatgaactcgggtccagaacgctgagaaaaaagttttttaaagagcttcgcgaggctggcgggcatgtggaggtctttttcccgtcaaagctcaggccgattaacctgcggctgaattaccggaaccatcgaaagcttgtgatcatagacggtatgaccggttatgtcggaggctttaacgtcggagatgagtatctagggcttaatccgaaattcggttattggcgggatacgcatatccggctgcaaggaacggccgtacacgccatccaaacacggttcatccttgactggaaccaagcttctcatcaccatacgctgacatatattccaaatcactttcctgattacggcccaaaaggcaacgtcgggatgcagattgtcacaagcggccctgattcggaatgggaacaaattaaaaatggctacatcaaaatgatttcgaacgccaagcgttccattttgatacaaacaccttattttatcccagatgcaagcctgctggatgctttaaggatcgcttgcctttcgggcattgacgttaacattatgattccgaacaagcccgatcatgcctttgtatactgggcaacactttcgtatatcggcgatctgctgaaagccggagccactgtctatatttacgataacggctttattcacgcgaaaaccatcgtggtggatgacgaaatcgcttcagtcggcacagcgaacattgatgtccgaagcttcaggctgaattttgaggttaatgcatttatatacgatatcaccattgctaaaaaactggtttcaacttttaaagaagatttgctagtatccagaaaattcacctatgaggagtatctgcagcgcccgttgtggattcgaataaaagaatccgtctcgcggctgttgtcgccgatcttataagatgtgcaaacccccggcctttacggccgggggttttcctgatggtcacagtaaatgatgatcgcctcccgcaaaaaagcggcaagaccttctccatattgattgattgaatcggtaaatcgctcgtcagtgatatacacttccccgagtcctctgaaaatgtcgagtgtgcaatcgtaatgatattggcaaatatgatcgcgaaatgcccccactgcggcctgaacctctgcatcatcgggcccatgcttcattcgcgccgcaattcgtctgtaaatcgaatcaaattcagccatgatcgagcgccaatcatctgccgagtatgcagatgtccttttctctgtttcttctgcgatttccttaccatacagctttctgacttcgtcagcgtatgtctgctgatgctcttcaatgtctttcatgcttaatccggcaaataaatccctcttattcatcgtttcccctccatcaacggacaaaagcgtcctgtcaattgtttgaatcatctcatccattctttgttttttcttcatcaatatctccttttgcgactgaagtgccgctttccggtcaaaattcggatgatccagcatctccttaatctcatccagacgaaacccgatttccttgaaaaataaaatctgctgcagtctttccaggtctgcgtcactgtacaaacgatacccagcatcagtaagcgctgaaggattcagaagctcaatattgtcatagtgatggagcgtccgaatgctaacacctgatatctccgccacttgtttaacttgatatttcatacataacacctcctcttttttatcgtaaacaatcacgcaacgttagggtcaatccccaaaatgttattttctatatacaaaacttctcacaaatagtgtataaaagaaaagtgagtatttttttgtaaaggggagccagtatacatgaatcctgaaacaatgaacaaaaccctcatcagcatttcgaaatggggaaaagctacaggcattttatttattattatgggcgcaattaccgcgctttcaggcgcgttcttttttctaatcggtgccgtgccaggcgtactgcaaattatttccggtatctttttgatgaggtcagctagggaagcaggccaaatggctgaacacaatagcggacagtctgaagacttaatgctggagaattacgcgaaattcgtaaagatgcaagggatttatttgatcgtaagcattgctgtatccattcttgcgattatcgccttcttcatctttttaatgcttgggattgctgacggccttttcagcgatacgtacagcacttattaatgagaaaaacccggagctggctccgggttttttattattccgcttcgcttaccactgtgaagcgttcatttttgtgttcgggatgttcaagctcgtccaacacggcaatggcataatctgcatagctgatatagctgtcgccttttgcatttacgatgacattgtcttttcctttttggtaagagccagtccgttttcctgctggatcaaaaaatgctgcaggactgaggaacgtccaggaaatgaagtctgtctgctgcaaatctttcaggttctctccttgatttgatgcagttggcaaatattctttcggaaattccggcgtatccattaaacgggttgttttggcttcatcaacaaacaggcttcccgctccgccaacaacaagcaatcttgtgcgcttcgcgtcctttaagatgttgatgagtgctcttcctgcttcaacatgaagatgttcttggccgggtgctgctccaaaagcgtttacgactgcgtcgaaaggcttgatgtcttccgcagtcagttcaaacacatctttttccaaaaccgctacgtcctgcccctgcacttttgaagcgtttctgacgatggctgtcacttcatggcctcttgttttcgcttctttcaaaatttcgtttcccgctttcccgcttgcgcctataataccaattttcatttttcatttcctccttatttgtaacaattttagttacatgttagcggtgagaagtcatcccttttgattaaaagagatgattcataacatcttttaatgacttgcttgccagttcattttccatcgctctttgcacactttcaaacgtttcatccagagcgttctgaatttttttccctaccggacatttcggattcgggttttcatgaaccgcaaagagttcttcttgcttttggacagcccggtacacttctaaaagagaaatatcagcaggatcttttttgaggcttgcacccggcacccctgcgcgtgatgtgagaatatcagcttttttcagcaggctgatcattcttcgcacaactaccggatttgtgttgacactgtcagcaatgatttctgaagatgttttttcatccatcgagatgagggataaaatatgaatggcaacagcaagacggctgttaatcatgttttttcaccaccgttgtaactataatagttacatttgattcgtttgtcaacatctaatatacactaaatacacgggttttgtgcaccgtttttagtcaatagaacggccggatgcactccggccgcgtcttatcaaaataagaaatatctttgtccaagtgggacataatcgacaggctggcaagacaattcctccccgtcagcaaagacctgataggtttttggatcaatctcaatctttggcaaagccgaattcagcttcatatccagcttgctcagctttctgatatttttgactggagaaatccttttttccagccctaagctttctgccacaccacgctctatgcttgcctgagacataaatgtaatcgaggttgagcggttggcttttccgtaagacgcatacatttggcgcatgaaaaccggttcaggagtcgggatggacgcgttcggatctcccatttgcgcacgtgcaatcatgccgccctttaagaccagttccggtttcacgccgaaaaataccgggtcccacagaacgagatcagcaagcttccctttttccaccgagccgacctcatggctgagcccgtgcgtaattgccggattaatcgtgtatttggcaatgtaccgttttgcgcgcacattgtcattcccgttttcaccggcaagagcgccgcgctgttttttcattttatcggctacctgccatgttcggatgatcacttcaccgacccgccccatcgcttgggaatccgatgatgtcatgctgatcgcacctatatcatggagaatatcctccgcggcaatcgtcgccgccctgattctggaatggctgaatgccacatcttcaggcactttcgcatctaaatggtggcagaccatcatcatgtcaagatgctcatccatcgtattaacggtataaggaatggttggcgttgtagatgacggcagaatgttcgcgtaagaggcgagcttcataatatccggagcgtggccgccgcctgccccttcaatgtgataagtatgaataacccggtccccgatcgcgtcgagcgtgttttccaaaaagcccgcttcgttaatcgtatcggtatggatggcaacttgaatatcagcctcgtccacgacttccatacacgttttaatggcgcttggcgtcgtgccccagtcttcatggagcttaaggccgatggcgcctgcttccacctgctcgatcagcggcgctttatcggatgcattcccttttcctaagaagccgacattgatcggaaactcctcggccgcttccagcatcctcgccatataccacgccccggacgtacatgttgtcgctttgcttcctgtagcgggtcctgttccgcctcccaaaagggtcgtcacacctgaagaaagcgcaacttccatctgctgaggacaaataaaatgaatgtgcgtgtccactcccccggctgttaaaattttgccttcaccggaaatcacctctgtccccgctccgatgaccatgtgtggatcgactccatccatgatatcaggatttccgctttttccgacaccgacaatccggccgtctttcacaccgacatccgctttgacaatgcctgtgtaatccaatagcacgacgttggtgataactaaatccaaagcgccgtccttccctgtgattctgccgttttggcccatgccgtcgcggattgtttttccgccgccaaagatcatttcttcaccatatactgtgaaatccttttcgacttcgatccataaatccgtgtcgcccaatctgattttatcgcccgttgtcgggccaaacagttccgcatattcctcccgtgacattttcatcggattacaccctccatccagccggcttgttttaagttggccaacgttttttctttgccgcgttcatcgataaacgtgtcggccattccgttcagccctttaattgtcttgcgtcctctgatttccactagtgagaccgttttctgctctcccggctcaaaacggaccgacgtgcctgatggaacatcaagacgcatgccgatcgccagctcacggtcaaataataaagccccgttggcctccgcaaaatgaaaatgcgaaccgacttgaatggagcgtgatccggtgttttttaccgttacctcccgtatctcacgcccttcattaatcgtaatggttccctcagcaatttgaaatgctcccggcttcatgacttcacctccgcagaaattggctgatgtaccgtaacaagctttactccatccggaaatgtggcctccacctgaatgctgtccagcatctcaggcacaccctccatcacatctttttccgttaatacatggcggccggcttccatcagctctgctactcccttcccatcacgtgcgccttccataataaagcaggtgatataagcagcagcctcaggatagttcagcagaacgccccgcgcctttcgctgtttggctaattcccccgctgcaaaaatgagcaatttctcttgttcaactggtgtcagtttcatctgtagtcctccttcttttgtcatataaagcagatgcggctactacgaatttgcggaacagtcaggcgggacatcacctccctttcttcgggaatgggggtcatacggtaagatgcctttcaaagcggcatgccgtttcttcatcagccttgccatggtcaacaaccgttcccctgtcgatcacggaaagatcagattaacgcgttttccagactgcgctcgactaagataacaaatgtctttttttctggaaatttctataataacttgtctgactagttcgacaattaaaatctgaattccttccaattgtttattaagtaaaatatttttcagatttaccatcagcgctctggcgattgcaagctgctgctgttggccgccttttcgctttgaacaaacgtttgattaaaataaatagcccccctgtttagccggaagcaggcctatggagtggatggccgactccatttcggcctaatacagcgacaatctgccccgggcgaagctaaggctgtgcaaaaccatcgattgatcataaccagacgttacattcctgatggcagcccgttgttttgctccgcaaccggaagtatggcatggaggccagtctgaggcgccgacctccacgataccgagaacccaactattgccattaactccgcatcatggacggtcacttcgctgatcgccaccgttcctcttaatgagtgaagaattccggccttcactgaatccccgcttgtgtcgatatcaactgttttctcgcactcccgtggcttccgacactttcttcggtgcagtacattcagccatcaaaacccctttgtttgatttcttcaaatgatgttataaaagtttacaacttatgtcatcattatatagaagaggcctattaattcaaagaatatttaaaaaatttagttaccttgaccaaatcagcttctttttttgttatatttattcacatcagaaaaagcgaaaaaaaaagacaagaaacatttcgtttcctgcctcttccgtacgattaatctttatctgaaaatttatccttggctttcccgatatccttttggatttcgccttttgccttatcttttttgccttcagcctgcatgtccgttctgtcagccatatctccgactttatccttcacttctcctttggctttattgaagccgcccttcattttgtcttttacactatcgttacccatgttaattctcccctctcaattatgtgtgtacttgttaacttcccgatctgagaggcaataaacattctaatgttatttatcgatttcgtagcgctctccgtaacggagcaccttgtatatcgccagcccgtctgatgactttttctccgaatatcggaccggcagcagggcaaaaaacacataatacgtagaaaaatagacaaactgatagaaaaacacattcggctttaatacactgtgtataatcagcagattgattgcaaaaatcgtgatgaggttaaacaagcagcctcctgcatacacgagtgcatttgagaatcgattgtcaattttcaactccccgtaccggcaaaaagaatcgataaaataaatcgttctgaaccgtatgggtccaattttaagcagcgtttttcccatgcctatatccaacgatccctttccgccaaaaataaaagccataaagctgtgccctgaaacatgtataatctgtacaagcggcagaacaatgaggaaagaccacagaaacttcaccatatcattaaaaccaaacattgaattccccctcacatgcatatctgcatcccaaaacggcttttgttcaaaaaacagtgctgtagcgatttttcctgttctccccggaaataaacgttccgatgctcccctttttttgcataaaaaaaaaccatctgccagcagatggttttgtctcatacttcatataaacaatcgttcctttgaatcatctctctcatgctgaccgctttttcataaaaatacaccgcttctttatattgttcgcgatgactgaaataagaggcagcatctaaagcaaattcttcaatatatacatacaggcccttttcttccatataatcaaatacttcttgaatcatatccaaattgacagattccacatataatgcctgcagaaatttatattttgccagactgaagaagtcgtttcgtttttgggcaatggcaatccctttttcatagtaccgtatcgcggcttcgctatcttgttttttgaaaagaacgcgagtcaggctgaagagcgcttttggaagctgttccagctgataatcctcgaagacaggaagcgctttttcaaagtattcggcggcctgatccagctcccccttgtcatcatagcaattcccgatattataaagggctgatccgatcaaacggggctgtccttccaataaagcaaggcgatacgcgtcatccaaatgctcaagcgctttttcataatttctgtagtctatgtagtttcctgatatgacgaaatggcattgaattcttctgactctataaaaatcgtgagccttatacgtctccagcgcctgtacagcgtggttcatagaaaagtgcgtctgcttcataatataaaagacttccgccactttaaaatgaaattccgctctttcaatttcatcttctacaaacgcaagcatcttctcagctttccgataaaaggatatagccgagatgtaattgttctgttcaaattcgtacattcctctaaacaagtgaaaataatactcagataatccggagatgctgtcctgattgctttccagcgttttgatcaattcacgatattgaagctgagattcctcgtgcaggtcaggctttacgtaatccagcataatttggtgccggtagctgatcagctgataatacaggagaagcagctgatcctcttccatctgttcgatatctagatcaatttcttctttcagctttacggcatcagccacttgaaatgctaaaatgtgcttataccacttattgattttcactcctacttgagatgacgggatctcgtacgcggccatgcccctccaaccctttctattttctaattggttatattttatcataatgtatggctttggaattaaattttcttacaatgattccttctttatgcctatccttatatatttcggtttttctacgtattttttgcactcggattctaataaaaaagcttaccggacagtgccgataagcttttgacttcaaattaaccgccaatataagacatttccactttctttttgccagatgcttttgatagcgtacgatcgactgaatactgatcgatccgatttttccatactgtcccgatcatttctgatagttcgtcatcacttaattcctggcgaaccggagctctgaggtcaaatccgcttgaagcgaataagcaggtaaacagctctcctctcgcagaaagacgggctctgttgcaagatccgcagaacgcatcagatacagatgatatgacgccgatttctccggagccgtccaagtagcggaatctggaagccacttcgcctatataattaggcgctatcggctcaaccggcatgtgttcattgatcaaatctatgatttccgcctttgtcatgacgtcttttttttcccattggttggtgttgcctacgtccataaattcaatgaatctcaggatatgccctttttctttaaaataacgggccataggcagtatatctttttcattgacgcccttttgaacgaccatattgattttaacaccgagccccgcttgcttcgccgcttcaatgccttccagcaccttgctgacagaaacaccgcgcccgtttatcttcttaaaacgctcgtcttctaaagaatcaaggctgatcgtaacccttttcagcccagcctccttgagcctcttagcataaacaggcagcagtgatccgtttgtcgtcatcgcgatgtcacgaatacccggtatgcgggccagttttttgattaattccggcatatcctttctcatgaggggctctccgccggtcaagcggattttttcaacgccaaatcttgtgacaaacaatgtcgcaagccgttccagctcctcaaatgaaagcagctcctctttctttaaaaaaggataatccgggccgaataattcggcgggcatacagtacgtgcatcggaagttgcagcggtctgtaacagaaatgcgaaggtctctcagcggtctgtttcttttatccaacatctgacgcgactctgtaatcatagctacagccccttcctactccctgattctctcagggtgtgtatatacattaaatgatccgtttctgacaaatccaatcgctgtgatattcaattcttcagccatttgaatcgcaagctccgtcggggccgatttggaaatgacaatcgacacgccgattttggccgcttttaacaggacctctgatgagattctgccgctgaacacaatcagtttgtcgcgtacggacatcccgtttagaaggcagtgcccgtatagtttatcaagtgcgttgtgccgaccgatatcggtgcgcatcaacagaagcttctctgtgtcgcaaagcgccgcattatggacgcctcccgtatcctgaaacgtcccgctcccttgctgcatgtctttcataagcgccagacatgcctcaggcgatatcttgatttggctgacagccgtcttggctgttttgacatcctgctgaaaataaaaatgacggccctttccgcagcatgagccgatcacccgtttcgtataatccttttgatccaatgtctcagggtgaacgaggtcgacatatacaaaaccgagactttcatctattgtaaaccttttaatttctttttgaaatcgtataacaccctctgatgcgagaaatccgatgacaagctcttcgatatgctcaggcgtacaaacgagcgtcacaaattcactgccattcagtatcactgtcaaagggaattccgtcaccatccggtcttctactttgcttatttccccttgttcatagcgccatacatccctgaccgcagttactttatcgttcaatgtctcttcccctccgcaatgttcctgcctttatattttttcacactcctcggattttgtcgaattctgagacacaaaaagagccctctatataaagggctttcacaggatgtgatgacggcggtgtttaggcagggcgcctaccgttccttttataacacgtgagcaccaatgtgcattgacaacaaacgcggggtttgtcgacacgctgagagccctctatagaaaggactctatggttgattatactgattcttttttagaaccgtaaacagcacaatagctgcgatcaaggtgagaatgctgacaaaaaagaaggctgccagttttagaagaacaccaagcaatatgaatgcaacggtggctataagaaaaatcattccgaataatttcatatgttcaacccctttttagggtatcattcccgcccaaactgtttttaaaccaataaaaaaaggcgcctgggggagcgcctgatctttaggttccttactcagtaaatttttgtgcttctttttcccaagcctgttcgaactcatccgcactgttcgctgaaatatattctccgccgccagcgacagctgcttgtttcatctcttcattacccttgacatcaaagttgaagccaatgatgtttacaatcgtatccacatttgatgcacggagcttttcgatttctgccgcagggtctccgccgcacgtttcttcaccgtcagtgattaaatacaccacgtttttcccgtctgcgtcaaatgcctcaaattcttttcttgtgtctgcaagtgctttggcaatcggtgtccatccagtcggcttgagctcactcaatgaattgtcaaacagggatccttcatatggatgaaggccgtaaatagtttccgtcgtactgcacgaaagggctttaccggacagtttattattccctgcatgcccgaaaacgcgaagcataagatttgtatccttcggaagaagttcggcaaaagattttactgattttttggcaatgtctattttgcgctctcctcctgttttttgaaccatacttccgcttccgtcaaacaaaacagctacatttgtatcagcctgtttctcagcggcaaaagacggggaggcaatggaaacagtcaacaatccaatgataccggcagccagcaattttttcatatgattacttcctttctttttcatattttccaactatatgttggattcttctttatgctagaatacgaaaatgcaaaaagatataggacatgctgccttttgtgctgctttcacgatctgtccaaaatcgcttgaaatgccgttcatttttagccatttccgcccagaaagcataaacagattgtgtgatcattcattcttttttcgccttgattatgacagaaaaacggaaatctgctactatgctacaggcagacagctaattagttttgaagtttttgttacatacaaaaagaggctgaccatcaccagcctcttttttcttatttagataacattagtgattgctgagtgaaaattttctcaacatctttttgggtataagccgggaagtattcaccgccgcctactttcgcaattgcgttcagctggcctttgtatccctctttataatcaaagccgatcacattaacagtgatattgtctttttgcagttcctttgctgttttaatcgggtttcctccgcacgtttcctcaccgtctgtcaacagatacaccactttttccccttttgcatcaagctggtcaaaagaagatttcgcctcgttcagcgctttggcaattggcgtccagccagtcggcccaattgtattgagagaattgaggaagctttgctcgttaaagctttggaagccgtatacgttgcgaatggcttcacatgactgaacttttccggaatttttattgtttccttcagagccaaacacgctcattttcacctgagttccttctggcagtgagctcgcaaactttgaaatttcttttttggctgaattaaatttagatacaccgtctattcttttcgccatacttccgctggcatcaagcaagaccgccacgttcgccggcgctttagcctccgtttctgacttttcagctgcaaaagcaggtgaagttaatccaaaaagcaatcctgtcatcatgatcagtgaaaatcttttcttcatgttcgtacccctttaccaatttgtttctgcgtgcagatgttcaacgctgaacataatctatcgtaatcaacaaaaaccgagaaataaatagggcgggcttccccattgctgttgtttacttttgcatagaaacctatgtttttattagtgatttccacctaacgcccctatgaaaagagaagattgtccgcctttcggctttcgttatatgagtctgtcgaagtctgtcgacaaatgtggatgactttaccacaatctcaaagcctgaaatcaggaaaaaaggactgatccttaaagacggccagaagctcctctaaaccgtttcagccgctcttagataaaagacattcaagaacagaaaaagacgcccaaagagcgtctttttctactttttcgccatgtatttattcaaaaacgcatctgcctcagaaatttgtgtgccttggtaatagtactttacaatgtcatcaaccgttttgccttctttggccataaaattcgctccgtattggctcatcccaacaccgtggccaaatcctctcgtcgtgactgtaattgtgtctccatttcgcttccattcaaaatcggcggagttgagacccagcttttcacgtatgtctcttcctttcagcgtcttgccgttaatgacggcagttgcgacctggtggcccggtgtctcgccggtaatcttccctactgcgctagatccatccagcttgacgccaagcttttgctgaaattctgccgctgtaaaggttttcgttgccttatatttcggagactttttatcccatgggcttttgacgctttttaaatatgggatagcacttgtccaataagcttctgcattctctgtgtagccgttgcttgtggagaaaaaggatgcttcaatcggctggttgttgtacgttaagattttgccttgcgtactggctaccgcagctgtgattttcttcagttttgtctcatagcttgtgccccactgttttttcagctccgctttgtttttatacacctggaacatctgtgtatcatccaccagtgagcctttaggagcctcaaccgctgaatttgacaccatcagtctgacaataaatgttctggcggcgagggcctgggctttcagtgcttcagattcaaaggttgccggcatttcggaggcgacgactccaatcacatactcttcaagcggaatgttttctacggattgatttgcggttcgatagacgggaatagaaacaggtgatgctttcaatgtttctgctcctttcgatgctggtttcgtgctgactgctgtcttttctgattctacactggcccccgcttccttattatgctggaatggtataaccaagagtgtgggaaccaagagaatcaatgcacatagtacggatagtgtgattgcgaattgtttcatattcagctgcctcctgctcgggattcgactctagtctagtctatgggcagggacaagctaatatgactctcgttttggacagaaactttatttgtcatttacgtattcttttttgctattttgcgcataatgatgataatacacaaaaaataaaaaaccagtatgccagagtgacatactgattttcaagtaagtttatgcatttaagtcagaaacgacttctttattctcttgctcagaagcagactcatcatttacacgttcgatgtctgcgcccagagcggcaagcttctgatggaaatcaacgtaaccgcggtctaagtgcttcaattcagtaacacgtgtgtgaccttcagccactaaccccgcaagaatcagcgctgcacctgcacgcaaatcagtcgctgcaacttcagctccctgaagctgtacaggaccgttaatgatgacagaacgtccttcaatcttgatatcaccattcatacggcggaattcttccgcatgcataaaacggttttcaaaaacggtttctgtaatcatgcttgtgccgcttgcacgaagcagaagcgccatcatttgtgactgcatatcagtcgggaagcccgggtgaggcattgttttgatgtcaatcggtttaagctctttcgggccgatgacacgcagaccttcaccttcatccttaattgttacacccatctcttccatttttgcaattaaagaggtgaggtgttcaggaaccgctccttttactaatacgtttccttcagtgattgcagcagcaaccataaatgtgcccgcttcaatacggtctggaataatatggtgttttacgccgtgaagcttttcgactccttcaattttgatggtgccggtgccagctccgcggatttttccgcccatgccgttgatatagtttgctaaatcaacgatttcgggttcttttgccacgttttccagcgttgttgttccttcagctagagcggctgccataatcaggttctctgtagctcctacacttgggaagtccagataaatttttgcgccttgcagtcggccttttacttcagcttcaatgaagccattaccgactttgatttctgcgcccattgcttcaaaaccttttaaatgctgatcaatcggtctggaaccaattgcgcatccgcccggaagtgcaactcttgcatgacctgtacgcgcaagaagcggccccatgacaagcacagacgcacgcattttacgaacatattcaaaaggtgcttcagtttgcaaagcgtatgaagcatttacagtcacttcattattttcaaaatgcacatctgctcctaaatgacgcaacacttcgttaattgtatatacatcggagagcgtaggtacatcacaaattacgcttttttcttcacttgctaataaagatgcagcgataacaggtaaaacggcatttttagcgccttcaactttgactgtgccgtttaacttctgaccgccgcggacgatgattttttccaaggtattcccctccgcgtccctaaattctctatattaatattcagtcgtaacgattggtgtgccaaccgtaacggtatgttttccgcccattcctgcacttctaagtgcaatttgcaaattcattttatgtttcgaggtcataatgtactcttcccactcatctgtaaacgcagaaatagaaacgaaatttggctcaactacatgttctactgatcttgcttgaaattcatttaataactgatttgcttttttttgcaaaacaatattcatattatcatctaagtgaccatttagacaagtaaaaataactactttttcttggaatatcccaagtgtctcccgttcaaactgttcatatgtatcattccagctatccggtgtctctagactcatttgctcatataataaatacgaagttggattgtgttttttgagggttgtgacaagctgcagtctaaaagaagatcgattttttttgtcagtatatgtgccaattgcctttatcattttatcttcccgtgcaatcacccaatcatattgacgatactctgattttaaacgttgcactttttgataaaattctttttcggtcagtgacatgttttgttttgcatgcaatgtccacttatctattgacacatcttggcgttccatcccctctgccatttgtgctaacggcgttaattcactcgcatgaatggtatggaaaacagcaatgacgaagcttaacatgacggaaatgataatagcgcggcttacttgttttttcttcatgttcatctctcccccttatccccagttttaccggaggcaagaggcgccatacgtaaaaatcttcgtcaaaactcgagctattcgcttcattcaaaacctattaaaatagatagggaagctgctgtgaataattgagataatctaaaaagaaattggcaacggccgttccaatggcaattgtcagcaaaatcatcaggagtcttgcctgcacgactttgccttttttgattaacggatctatattgacggcttgcaacgcccaccaagtcactgctataaaaatcaggtgaacgacaatgccgattgcagcctgctgtcccaatacactcatctattacactcctttctctgcgttcataccctttcttattatataagaagcacagataaagatgatacattttatacagaacggaataatcacccaaatctagggctaatccccgcttaaagtgcgattcttttacatggtatactttattggaaaggagctggcaaatgtgaatcattctttttttcagcctgaaaagcaatatggtgaggacctgccaatttttgatcaggaatgggaagcaattgcattctattatgattatagacagtcacagattgaagaactgaatgaattgtgtcagttttttaacatttctcttacctatacgagagaaagccttgaagagcttgaaaacctctattttcaaagtatacaagaacttttgcttgctgattggaatcttcctattgaagaattcgagaaaatgatcagtgtttatcttatagattgtgtgattgcccgccatgaagatgctgaatgggttgtaaaaccttatccctataaagacggcgcttatacacttggctttagaagacatcgcaaatcgtggcatacaatgaatgcctgtgatggtttatacctgcgtccaaaagaggatcgcccgctgttatcgctgtttgattctcttgtgcgttcataaaaaaatccttctctttatgagaaggattttttcttatttccctgctacatccaatctgttcaaagcccgctgtaacgcaagctcagcccgacgaatgtcagtatcatctgattgagaattcaaacgctcctgcgcccgctggcgtgcagcttcagcgcgctctttatcgatgccttctgctgtctcggcagcctgggcaaggatggtgacctgatcaggacggacttcgacaaatccgccgctgacggcaaccatttcagtctgcccgtcttttttcagacggacagcgccgattttaagaggagccacggttggaatatggcctggcaaaataccgagatcgccgctttcggctctcacactcaccatttcgatatccgcatcgtatactgggccgtcgggagtaacgatattgactttaacggtcttcatgcttttaccctcctaggaccagattaaacttctacacccatttcttttgctttctcaacaacttcttcgatacggcctacaagacggaatgcatcttctggaagatggtcatatttaccggctaagatttctttgaagccttgtaccgtctcttttacaggcacgtaagatcctttttgtccagtgaactgttcagccacgtggaagttctgagaaaggaagaactggatacggcgtgcgcggtgaacgacaagtttgtcttcctcgcctaattcatccataccgagaatcgcaatgatatcctgaagctctttgtaacgctgaagcgttgactgtacttcacgcgcaactgcataatgctcttccccgacaatttcaggagcaagggcgcgtgatgtagatgccaacggatcaaccgcagggtaaatacccatttcagttaatttacgctcaaggtttgttgtcgcatccaagtgagcgaacgttgtcgccggcgccgggtcagtgtagtcatcggcaggcacgtagatcgcctggatagatgtaactgatccaacgttcgtagacgtgatacgctcttggagctgacccatctcagttgcaagcgtcggctgataaccaaccgctgaaggcatacggccaagaagggctgaaacctctgaacccgcttgtgtgaaacggaaaatgttatcgatgaagaacagtacgtcctgtccttgtacatcacggaagtgctcagccattgtaaggcctgtcaaagcaacacgcatacgtgcgcccggcggctcgttcatttgtccgaataccatggctgttttgttgattacgccagagtcactcatttcgtagaaaaggtcgttcccttcacgagtacgctctcctacgccggcgaatacagagataccgccgtgctcttgcgcgatgttgttgattaattcctggattaatacggttttacctacaccggcaccaccgaacaatccgattttaccgcccttaatgtaaggagcaagcaaatcaacaaccttaatacctgtttcaagaatttcaacttctgttgaaagctgatcgaatgaaggcgcctgtctgtgaatcggatcctttttcgcatccgcaggaaccggctcattcaaatcaatattttctccgagaacgttaaatacacgtccaagtgttacatcaccaaccggtactgagattggcgctcctgtatctacagcttccataccgcgctgaacaccatctgtagatgccattgcgattgtacggactgtatcatcacctaaatgaagagcgacctcaagcgttaaatcaatacctacttcgttttcacttgcagctggctgtgaaattttaatcgcattataaatttcaggcaagtgaccgtcttcaaaacgcacgtcgacgaccggtcctaatacctggctaacgcgtcctttcttcatcgctatccctcctgacaaaatctttctattctaaagcggctgctccgccgacaatttccgtaatttcttgtgtgatggctgcttggcgagcgcggttgtaagaaagcgaaagtgaatcgataagttccttcgcgttgtctgtcgcatttttcatcgccgtcattcttgcagcgtgctcacttgctttactgtcaagaagcgcaccgaagattaagctttctgcatattgaggaagcaaaacctccagaacctcctcttcagatggttcaaattcataagacgccgttctttttccgccgccgctgcccaaatcagataacggcagaagttttttctccgttacttcttgagtaatggcgctgacaaaatggttataaacaaggtgcaattcatcaaacgcaccgtctataaacatttgaatcgtttgacgggcaagatctttaatttctgtaaacgttacttcatccccaagtcctgttaactcggaaatgatcggaatctcccgtttcttaaagaaatcacggcccactcttccgatggcaatcaccgcatactcatccttagactgatgacgttcttgcatggcctgataagcactccgtaaaaccgaactgttaaaagcgccggcaagaccgcggtcagacgtaatgacaaggtatgccgtttttttcacttctctgctgagaagcatcgggtgcttcacgttgccggaaactcttccgacgtttgacacaacctcttggattttatccatatatggcacaaatgattttgcattgttttcagcacgattcagcttagccgcagataccatctgcatggcttttgtaatctgacttgtttttttcgttgacgtgatccttgacttaatatcgcgtaatgaggccaaagatttcaccaccttttctcttcatctgcgtaaaaagagagaaaaagagaacctttttctctcatcagcattcgagttagttgcttggtgcaaatgtgcgtttgaagccttcgattgcagcattgaagtcttcatcagcaggaaggtttcctgttttcgcaattccgtcaagcaggtctttatggttttggtcaaggtacatgtagtactcttcttcaaaacgtctgatatccgccacaggaatatcatcgagatatccttttgtcagcgcataaagaatggctacttgcttttcaaccggaagcggcttgttcagatcctgcttcagcacttcaactgtacgcgcaccgcggttcagttttgcctgagtcgcttggtcgaggtcagaaccgaattgagcgaatgcttccagctcacggtatgacgcaaggtcaagacgcaaagtacctgatacttttttcatcgctttgatttgcgctgagccgccgacacgggatacagacaatccggcattgatcgctggacgtacgcctgagaagaacaaatcagattgcaggaagatctgtccgtcggtgatggaaatgacgttcgtcggaatataagcagagatatctccggcttgtgtttctacgaacggcagagctgtaattgatcctgcgcctttcgcgtcgctaagctttgctgcacgctcaagcagacgggaatgaagatagaatacatccccagggaacgcttcacggcctggcggacggcgaagaagcaaggacagctcacggtaagcggccgcttgtttagaaagatcatcgtatacaacaagaacgtgcttgccgttgtacataaattcttctgccattgtaaccccagcatacggtgccaggtacagaagcggtgccggctgtgaggcagacgccgttacaacaattgtataatcaagcgcgccgtgtttacgcaatgtttctactacgccgcggactgttgattctttttggccgatcgcaacatatacgcagatcatgtcttggtctttttggttcaggatcgcatcgatcgcaacagatgttttacctgtttgacggtcaccgatgatcagctcacgctggccgcggccgattggaatcagtgcatcgatcgctttgataccggtttgaagcggttcatgaacggatttacggtccataacgcctggtgcagggctttcaatcggacgagttttgcttgtaaggatcgggccaagtccgtctaccggttggcctagcgggtttacaatacggccgattaactcttcaccaacaggaacctccatgatgcgacctgttctttttacttcgtctccctcacggatctcactgaaaggtcctaagatgacgatacctacgtttgattcttcaaggttttgagccatacccaaaacaccgtttgaaaattcgacaagttcaccggccatacagttgtcaaggccgtgcacacgtgcaataccgtcaccgacttggatgactgtacctacgtcttgaacttcaatatcagattgataattttgtatttgctgttttatcagcgtgctaatctcttcagctttgatgctcacttaggtttcaccccttctatcgattttccccggctaattgacgttcgatgcgctgaagcttcccgcttacgctgccgtcataaatccggtttccaatgcggactttaatgccgcctattaaatccgtctgcacttcatttctgattctcagtgaagcgactccggctttttttgcaaacacttgtgataatggtaacatttctgcatccgtcagcggtttcactgaatatacgattgcgtcttctgtttgacgggccacatttgcgagtttgataaactcatctgtgagctcagggacaatcgcggcacgatggcggtcaatcaaaagaaaaatcgtattgagtacggactgtgacaaagagccaaatgcattttgaatcagctcttttttcttcgcagccggcaccttcggatggttcaacacatcattaagcgctttttcattttgaaatacttgttttacaacaattagctcttcttctacttgattcagctgagcggactcattggctatatcaaaaagagctgatgcatatcgtttagagacagctgatccactcatcggctttctcctacctctttaagatagtcctggatcaatttctcttgcgcttgttcatccagttctttttcgatcactttcgacgcaatcatgacagaaagagacgctacttgctcacggagagcagaaaccgcctgttccttttccttcacgatttcagttcttgctgcttctttcagacgttcagattctgcacgtgcagcctgaataatctcttctttttgcttctctcccagtttctttgcgttttcgataagagtttgggattcctgtcttgcttcttttaaaagaacgcgctgctcttcaatcagctgctgcgcttctttatttttttcttcagcagacgtaatttctccagcgatgtggtcttcacgctgtttcattatgtttaatagcggccctaaagcgtatttcttcagaagcgctaataagattaacatagctaacagttggaacaggatatctccgccgttaaacgacaatcctagttcaagtggtaattgagacatctactacggcaactcccttctgcaggtttttctttgctgatccagcagccgcacttgtctcttttcagccggcaaggcgggatgcttatcagacataaagcaatggcgaaggttctcttggaatgatcttcgccatttttagttcatataaggcttttatgcttagccaaagaacgctaagaatgcgataacgacagcgataataggaagggcttcaactaatgcgatacccatgaacataagagttctcagttctttacctgcttccggctgacgggcaatcccctctaccgtacgtgaaacaatcaaaccgttaccaatacctgcaccaagtgcgcctaaaccaattgcaatcgcagctgctattaaattcatgaaaaagttcctcctttaaaatgttatccgtttggatataatgttttaatgatcatgactgattttatgagacatgtacaccatcgtcagcattgtaaagataaatgcctggatagcaccaataaataaactgaatgcttgccatgccagcatcggcagaatggcaccgattgtaccgacaagaccgagagccacgctttgcgaataatggcttgttgctaatcccgcaagcaggccgagaagaatctcaccggcgaagatgttaccatacagccgcaaacctagagtcagcgtattcgcaaactcttcgatgattttcatcgggagcatgaatggaacaggtcttaaatagtctttggaatattccttgagccctttcatcttcacaccatagtagtgggttaaagcaacaaccatcacggctagcgttaatgtaatggcaggatcggctgtcggagacttccaccagagctcatgtccgattgtaatagagaacggcagccccagcatattcgacacaaatatgtacatcagcaatgtgacaccaagtgccaagaagttagcccctgtttttaaatccattgtactgccaataatattgcggacgaaatcaacaatccattccataaagttctgggcttttccgggacggatcgaaagcgttcttgtcgtcaatatagcaatcaataaaacaatcacactcgccacagtaatcatcagaatgtttgtcagattaaaagtaagacctagaaattctatagttctgtaaccatgattcaaagggttttcacctctcttccattgatgaacgtttaagctggataaaggaatctatcataatgacagggtatattgtcattaatccaataactgtacttgccatatgaaagtattcgggatttttataggcaacagccacagcaagaatcgcattgcaccaccgcgctgcgctcccgagagatcgtatggactttcctttctcaacagctctgtcaaaagcattcattcttctgacgagcagtaaaaaattaaacaaactgaaaacagttcccagaataaggcctaaaaaaacggttttatacgctgttaaaccataacccagtacatacactgccaaaatgaacaataaatatttgcgttgtctgctaaatgtaagcttgggatcgtccatcaattatctgtctcctgatgaaaaaataatgtatagcttggatacggcaaaaatcagcggttaacccttagtagaagaccttttttgaccggcaaaacgggcctgttcgaaaaaatcattcatccgcaagccttgcagggatgctgtttcattcgcttaaataaatcctcataatacgggtttgctgagaggatttacattgaggatgaggactataatgaaagctatgaaaaccttctcataataccctcgtttagcatacaatagcccctaacatgtgtcaatctgtttaaagttaaaaaactttttatactttacgtctccacagaatgttcacattttcacctataattgtatacagattcaccgaatagcaaaaaactggataaaaaaatgaaacccccttttggggatttcattttttattttgttccaaacatgcgatcacccgcatctccgagacctggaacaatatatcctttttcatttaatttttcatctagcgccgcaatgtaaatatcaacgtccgaatgatgcttctgcaattcttccacaccctccggcgctgctacaagacacatgaaacggatatttttcgcaccgcgttttttaaggctgtgaatggcttcaactgcggaaccgcctgtagcgagcatcgggtcaaccacgatgaattcacgctcttccacatcagaaggaagcttgacatagtattccacgggttttaaggtttctggatcacggtaaaggccgacatgtcccacttttgccgcaggaatcagctttaaaatgccgtcaaccattcccaatcctgctctgaggataggaaccactccgagttttttccctgagatgactttcgatttcgcagcctgaaccggtgtattgatatccacttcttccagaggaagatcgcgggtaatttcaaatgccatgagtgtagccacttcatctactaactctctaaaatccttcgtacctgtattttcattccgtatatatgtcagcttgtgctgaattaaaggatgatcaaatacataaacctttcccatactgtgtttcagctccttttttattgtcccatcaacaattacacacttctattgattctacaaaaaaagacattgagtttcaagaacatcgtcaaaaaacccgccgggcataagccccagcgggttttaggatcttaataatctaattctttatataaaggaaatttatcagtcagagcagctacacgctgtcttgcttcttcaagttttccttcgtcttcgtggtttttcaatgcaagcgcaatgatagcaccgacttcttctaatgcgtctccgtcaaaaccacggctggttacagcagctgtcccaagacggatgccgcttgttacgaaaggtttttcaggatcatatggaatcgcgtttttgttagacgtaataccgatttcatcaagtacatgctccgcaaccttaccagtcagtccgagcgaacgaagatcaacaaggataaggtggttgtctgttccgcctgaaacgagctggatgccctctttcgttaaggcttcagccagacgtttcgcgtttgaaatgacgttttgtgcatatgttttgaaatcgtcctgcaatacttcaccgaatgaaacagcttttgcggcaataacgtgcatcagagggccgccttgaattccagggaagatcgatttatcaattttcttgccaaactcttcacggcaaaggatcataccgcctcgaggaccgcgaagtgttttatgtgttgttgttgtaacgaaatcagcgtaaggaaccgggtttggatgaaggcctgccgcaacaagtcctgcgatatgtgccatatccaccatgaagtaagcgccgacttcatcagcaatttcacggaatttcttaaagtcgattgtacgaggatacgcacttgctcctgctacgataagcttcggtttatgagcgagggctttttcacgcacgtcatcgtaatcaatatattgagtttctttatctacgccgtactcaacaaagttatattgaacaccgctgaagttgactgggcttccgtgtgttaaatggccgccgtgggagaggttcatcccaagtacagtatcgccttgctccaaaatcgtgaagtacactgccatgtttgcttgtgcgcctgaatgaggctgaacgtttacatgctccgctccaaagatttccttcgcgcggtcacgggcgatatcttcaacgacatcgacgtgctcgcatccgccgtagtagcgtttgcccggatatccttctgcgtacttatttgtcaaaacagatccttgtgcttccataactgcttcacttacaaagttctcagaagcaatcaattcgatcttagtctgttggcgttcacgctcatttttaatggcgttaaacacttgttcgtcttgcgcaggtaaatgtttcatcagcgagatcctctcctatccgtatcctgttctttgtttttaccatcactattgtacatggtttttaaggccgatgtaaaagattatttttaaaaaatctaaatttttattggtaaaaacgaatattaataacttaaatttaatttaaagttcggaatttatttcactgtcttaaaataaaagaaaagactggctatgcagtcctttcattcacactcataaaccgcccgcactccgccgattagtttcggccgtgtacgcgccaatgtcacatgagctgaaccgaggctgttttgagagacacgcatagggacagccaccggcttcagatgcatgccgataaacgtatcgcctatatcaattccggcgtcagcctgaatggtttcaacaagaacaggagacttcatctgcttaaacgcataagacgccatcgctccgcccgcttttggaacgggcacggcagaaacggttggaagcctgaacagcttggctgtttctgcttcgacgacaagcgctctgtttaaatgctcgcagcattgaaacgccagatggattcccgttttttcccggagctcagcaagtccgctgtagatgctttcagcgatatctacactgcccgatgtgccgatccggctgccggccacttcgctcgtgctgcatccaaggacgaagagctgatcttgtttcaattccgcttggtcctgaaactcagacagcatcgtcttccacgtttgtttcaactcattcattaaacagcacccctacaggtttttctcttcataatcggagatttttccaatacgcgtttggtgtcttcccccggtaaactcagtagtcagccagatttttgcgatttcccgagccaaaccaggtccgatcacccgttcacccatcgcaaggatgtttgtgtcattatgctccctcgtcgccttcgcgctgaaggtatcgtgcgccagcgcgcagcgaatcccttttactttattagcggaaatgctcatgccgatgcctgtcccgcaaattaaaatgcctctgtcaacttcgccgctaaccactttttcggccaccggaaaagcataatccggataatcgacagagccgctgccgcagtcacagcccatatcaatatattcaatttgcaattcgtccattaactctttgatttcatttcgaatgtgaacgccgccatgatccgatgcaatggctactttcatctgcttttcctcccagcgtgtgtgatgcggcccgcccgctttattgaccgcgcagcctgtccgctctttgattcacaccatatgatgtgcttttcactatattctactccttcacgcaggatttgcaaatgacctgtttgcagattttctgacaacttatctacggtcttttttcagctgttttgccagctgccgaagaagctcttcaagctcatctcgcgtttgtttatagatgtcaattgagccgccgaacggatcgaggacatcaccatggctgcctgtgacatattcttttaacgtaaacactttatcacgataacgtccaaattggctggcaatgatctgtttgtgctgatgggtcatagccagaaccaaatcagccgattccataagttcttcagttaatggagaagacacatgattaagggcaatgtgtttttcaaacaacgcttcgactgcatgaggcgtcgctttcccattaggtgaagcaaacacacctgccgagcggacattgacattcagcccttccatttctgcaattgatttaaaaagcgcctcagccattgggctgcggcacgtatttccagtacagacaaaaataatatccatgtcagtcaccccttatttttctctattatatatgaagaaaaaagaaacggcgacttcgtttcttttattggtatattaaattggcaaaagcagctttaatccaaacacgattaatatgatgcccccgagcgcttcgctgtatgtgccaagccatgactgcacttgttttccgaccagcaggcccagccatgtcaacatcatgctgaacagcccgaacagggtaattgtgaggagcggatgcgagccgtatatccccaagctcaagccgacggaaaagctgtcaaggctgacgccgatggcaaacagcaataagcccggccctgccggtgacatgaatcgttcttctgactgtttaaaagaggccataagcatttgaaccccaagaacaaaaagcagcgccccaccgatataaaccgctaacacgccgaggagccctgacagcatgttaccggccgccatccctgcgagaggcatgatgacgtgaaagaggccgatgatgaaaccaatatagaatatctgcttctttctaagtttgaccatgcccattccaaggccgacagaaaaagcatccatccctaaagcaaacgccatgatgcttaatgtaatcagttcgcctataaacaaatccgacatacataaataacccccttggacacgccccgcttttttagcctatgcgtgtccaaaaagggttagaacatctgactgctttcagcgaatcactcttcctccggcggctttcatcagcctgttcataatagcaagaccgacacctgtatccggaaaggattccgctataatgaaatccaccttattctcatcaaagctgcgcaaagcatcatacagccctgccgcaacagtctcaagctgagcccgtcttccgcagctcttcacataatcagcggaataaacgcccgcgttttcttctgtcgtcaggacaccgacccgtcttccgccctgttgatattcttgaatgaggtgctgaatgcgctctgggctgccttcgcaaatggcaagaggcgctgtcggcgcataatgtgtatatttcatccctggagaaatcggcttctcgttttgatcgctgagccctttatccacatggatcggcccgatcacggcctcaatttgttccttcgtaatgccgcccggacgcaggagaacagggatgtcgtccgcacatgaaagcacagttgattcgaccccgattccggtagggcctccatccataataccggctatgcggccatccaagtcgtgagccacatgctccgcttttgtgggacttggcttgcctgatagattggcgctcggtgctgcaatcggcagtcccgattcgcgaatcaatgcaagggcaagcggatgatccggcattctaatggcaaccgtttcaagacctgccgttacacgaggtgaaagcgcatcaggtttgcaaggcagaatgagcgtaagtgctcccggccaaaaccgtttcatcaatgttttcgccttttccggcgccgggcccgttaaatcctcaagctggctgatatccgcaatgtggacaatcaggggattatcgctcggccgccctttcgcctcatatatttttttgacagcatccgtattttttgcgtttgcgcctaggccatatactgtttctgtcggaaaggcaacgacctcattttctcggagcaaagcggctgcttgtgcaatttgtggatcatttgtggataactcgtcagttacatccacaaaccatcttttcgttttcatttctgaccaaactccttattcacaacaataaaacgattgttttacgcgtgtaatccttttgaaagtataaaagatgtcctgtaataaaacaagcgttatccacaaattgtggacaacgctaataaagaagtggataagtatgtgtataaactgcacttatccagacgcttttttcatcaaaacggccccttctgtttgccgcgattcacagaagtgatcagaagaaaacagctcctccggtacactttcagctctttcaaaacccatggccgtcagaaagtccgcagaggaatgctgattcgctactaggtacacggttttgatctgatgcttttcgcacagcacctccatgctttgaaaaagcgtgacgatgtggccttggtgaagcttgtccgatatgacaagtgatcgcagcagcccctggtcacagctgattttttcaataccgaggcatccggcaatgtttttctcactgtcctccagcataagaaattgagtgaagccttctttcacgccttcatagctggttttcgcctgttttaaaaattcctcgagcacatctccgtctttttcccttgccacccgcagttgataaaacatccgttcaccccgtttttgcgttctttcttccaatctatgaggcaaatctatttttagaccagatgattaggaaaaaaggtcggaaatccattcgactaaaaagaatttcacttctgtgccgtcttctttttcttcattctcttcttttttggctttttccgctttagcggttacgtcctcaagcactttttcagtctgcttttttgaggcttctttatcttcttgttctttgacggcttccccgttagaaaaatcgagaaagcagaggggcgggaacagcacacaccaccagttggcgccgtctccgtttccaagcgtaatcaaaatcgcttcatactcaccggcaggatataccatgttgccgtaaagctttgtcggaaacgagattttgtcaaaatcaacggatatcgactgattcgctccttctttctccattgtttcctttgcaattgctttgatttcaggcagctttgaacgaatcacgcgacgcgcttcttcaatagaagtaatatcctttacccaagttgtgatttctttattcaccgcgtctcttatatgacgttttaattgctggtcttgatcactatcgctgtttgccaatattctcaaacgaatcgcctgatccggtatgaccaccggctgattttccgatttctgtgccgtctcttcttttgccagccctacgagcgctccagataataaaagaaagatatatatacaaatgattactgtttttttcatcggtccccaccgttcctctccgtgctttgtttctagccctattatggacaaggagagccgggggtaaacgtgcagggtgaaaaaaatctagcaagctgttaatcttatttatggtacgatagtgttttaggaggtttaagatgaaatacaattatacagtgctgttatcagcattcacgatgtccgttctttattcagtaatttatattcattcatttatcattgccgctctcatcacaatggcattttattttctgtttccttatttgatcttcgcactgccgcttcaaatcatgatgaataaaaagccgaaacggttcagccctttgtatctgctgtattaccttatcgctgcttttattgccaacgcgatcattttcggcgtgcttcagccttcgggacaatctttgtttcaaaatacagccttttatcttttcgctgtattaacagctcttatctattggatatgggattctgttttactgcaaaaaaaggaagcctaagaggcttccttttttattaaaacaaaatcgtcagcaaataacatagaatggaaggtatcgccgcaacaaagaaagcggccgccattttcatgcgagatgtacggccttctttggtttcagaatggtagtttgcccgctgatcgcttccgcttacagccaaacccgatgtaatgatcgcgagccccactaaaacgagagacgcaacgccaaaaatcgcttcatatgaaagagcctgcggaaaaatggtgccaatcatgctctcaatcgcaatgagcaggattcctgctgtcagggcctttttcatgtttacatcccctttgctggtgttaaacagcttgatccattcactcgccagcaagctgcttatttatttttatgaatcagagcgcatatggttctgtcttttccattaatatctttcagcacttccacttccgcccccttaaacgccttgaggatcaggtctttgaccgccgctccctgtttccagccgatttcaaaaacgacaaatactttatccttcataacaagcggaatgtcttccataaaccgcttataaaatttcagcccgtctccgccatcggtgagtgcgtgcagcggctcatgaaaacggacaatttccgataaatcagccatttcttcctctgaaatatatggcgggtttgagacaatgatatccgctttttttcccgccttaataaaaggctcaagcagatcgccctgataaaagcgcacattcgctccgagtttttctgcattggcagaggcgacttgcagcgcctctttcgaaatatcgaccgccgacacagaaaagctttggttttcaagcgcaagcgtgacggctattgcgccgctccctgtaccaacgtcaacaacttcaagcttgccgtcttcagaaaagacactccgatatttttcaagcaaatgaaagacaacttcttcagtttccggccgcgggatcagcacatcatcattcaccataaattcccgtccataaaaaaactcttttcctataatgtattgaaccggcacgccctctttatgcatctcaacgtgacgcttaaagcgatacagttcgtcttcaccaatcggttcctgtaagcttgcgagcagtttgcttctctccattccggtatcataaagcaataggagctcggcagcattttcttctcttcccgcttcggttaaataagaagaagcccatttcagggcttcgaatatcgtcttcatcttaaccttccgactgctgaagcttgcttgcctgatcttcaacaatcagcgcttcaaccacttcgtcaagttttccttcaagaatctgatcaagcttttgaatcgtcaaaccgattctgtgatccgtcacacggttttgcgggaagttgtatgtgcggatacgttcagagcggtcaccagatccgactgctgatttccgtgtttgatcatattcagcctgggcttcctgctgaaatttatcatagattctggcacggagaaccttcattgctttttctttgttcttaatttgagatttttcatcctggcatgatacaactacacctgtcggcaagtgagtcagacgaaccgcagacattgttgtgttaacgctttgtccgcccggtccgcttgaagcaaacgtatcgacacggatatccttctcatggatgtcaacctctacctcttctgcctcaggaagacatgctactgttgcagtggatgtatggatgcgtccgcctgattctgtttccggaacacgctgtacgcggtgggcgccgttttcatatttgagtttagaatacgcgccgcttcccgtaatcataaagatgatctctttgtagccgcccgttccggttacattcgcttccatgacctctgttttccagccctgaagctcagcataacgggaatacattctgtacaggttgcccgcgaataaagcggcttcctcgcctcccgcagccccgcggatctccataataacgtttttgtcgtcattaggatctttcgggatcaggagcaccttcaggcgttctgacagtgtttccgtttccttctgaagttcagaaatctcttccttcaccatgtcgcgcatctcagcatccagcttctcttcaagcatcgcttttgcatcagccagctgttctgacgcatctctgtattgtctatatacgtcaactgtttcttgtatatcagattgctcttttgaatattctcttagctttttcggatcgttgactacttctggatcgctcaaaagctcatttaatttctcgtatcgttcttcaattgattttaaacggtctaacacggtcttcacctctgttttcctgtgcgtaacattctcattatagtatagtgattaaccccagtcaaaagcatttcaatcccagctttaaaagcctcctctgctatactgggaatcgaggagggatattgttgctgaaatccatacatcatattgcaatcatatgttcagattacgaaaagtcgaaagctttctacgtacataagcttggttttcaggtgattcaagaaacgtaccgcgaagagcgcagctcctataagcttgatttgtcgcttaacggctcgtatgtcattgagctgttctcgtttcccgatccgcccgaacgacaaacccggcctgaagccgcaggcctgcgccacctcgcctttacagtcggtagcttggataaagcggttcaggagcttcatgaaaaaggaatcgaaacagagccaatcagaacagacccgctgaccggcaaacgtttcaccttcttttttgatcctgaccagcttccattagaactgtatgaacaataacagtttttgaagaaaaaaaggagatacccactttctttgccgaatcttttcttgttttgtctaacgggaagggaacctcattctatggtcgaatacctagcttaaaaggaggtatgggatcatgaatacaaatatggtagcaagtgaactcggcgtctccgcaaaaacggtgcagcggtgggtgaagcagctgaatctaccggccgaacgcaatgagctcggacactattcgttcacggcagaagacgtgaaggttctaaaatccgttcaaaaacaaatctctgaaggcacggcgattcaggatattcatctgccgaaaagcgctaaaaagcgcacaggcttccttgtccaaaaaacaaatagcgacacagaacgaagaatcgagcagcttgaacaaaagctggacacccttttacagcaaaggcaggacgaaagtgaattgatggcaagaatgtcggaactggaacgccagctgaaacaaaaagccgatgaaggtgtatcttaccagctgcttcagcaccgcagagaaatcgatgatattcttgcagatctgcaatcactgacctcacaaatgaaagaattcaccgctcagccgatccccgagactgctgctgcttctgaaaaaaccaaaacaagaaaaaaaccgctgctgtcactgttcaaatttcaaacctaaagcaaaaagctccccgtaaagggagctttttttgttacgcagtaagcgcgataatgattggaagtgaaatcaatgacagaatcgcactgaccacaaacgcagttgcagtttcttcttcttgtttctcgaaacgagtcgcaatcatggctgcaacggcagaaccagggaatgcaacaagaaggattgcttttgttgtttggtcagccggaagtccgatagcaagagcaatcaggaacattaatgcaggctgaaccgcaacttttagtaacgcaataccgatagccggcatactgagtttaattttacgaataccaacggtaacaccgacagcaaagagagcaacaccagatgttgtgcttccaagctgatcaagcattttaacacccagctcaggaagagtgaaattgaaaaccagcaccaagatcatactgattaacggagcagctgcaagcggctcacaaagaccatgcaggattgattttcctgtcatcttccagaagctgtcgccactctcttcgtttttcttagaagactcaccaacagtagcgataatgatcgcgagcggatcaagaatcgcgttaaccacgatacctgtgaccgcgatcggaatcgcaacttcattcgctccgaataagcttcccaataccgggatacccataaatgcgaatgtcggctgtgcagagttcaaagaaaatacagatgagttcgttaaatcatacttgaaaataaatctgcaaaccaaaagaatgatgatatagaaaccaacaatcccaataattaaagaaatcattaaaggtacttgtgataaaaattcacttctggaagttgtcaaaataccagcgataaagtgagctggaagtgcgtatttcgttactaacgtacttaccccttttgccgacttggcatcataacttccaaaatgtcctgcaaaccaccccagcacgataacaaagaagatcggcgccaggaggattaagatatctaagatgctcaaaatattctcctccaaatcctatgtccgtatactttagctttacaaaaagctttccctcggacagaaaaatttactcgctaattatttcgcgatgacttttttgtattcaggtgtccacattgcttcaagtaccgcttgtttcacatcttcaggctgacgatttgccacgccgtctttaattgctgcttcagcaacggcaatcgcaacttggatagaaacctcttgaagcttatcaatgcttggaagcaatcctgctccaggtgtttcaagatcaaccatttcagcaatcgcatcagcagttgctgcaaacatagcaggtgtaatgatacgcgcttcagctacaattgaaccaagtccaagaccagggaacgcgaatgcgttgttagattgtccgatttcataagaaacaccgttgtattctacattgtcaaatgggcttcctgttgcaataagcacttttccgtcagtccatttgaacagatcttcaggaacagcttcagcaaggtgagtcgggttagacatcggcatgataaccggacggtctacgtgagatgccatttcttttacaatttcctctgtgaatgcacctgaaacccctgaagtaccaatcaagattgttggtttcgcttgacgaacgacttcatcgaatggaatttgacctttttcatcgcgcttccagtctttcacttcatccgcattgcgaaggtaaggtttttggaaatcaaggatgccttcgatgtcttcagtcagcaagcctctgtaatcaagtgtgtagaaacgtttgttagcttcttcttcagataatccggctagcaccattgtgtcacggatttggtcagcaataccgataccagcagaaccagcaccgaagataacaacacgctgatctttaatagaagcgccggttttcttcatagcggcaagcacacctgcaagtgtaatcgcgccagtaccttgaatatcatcattaaatgtcaggatttcatgattgtattttttcatgatgttgcgtgcatttttgttgccaaggtcttcccagtgaagaagcgctttagggaagaatttcaatgcagcttttacataagcgtcaatgaaagcttcgtagcgttcaccttgaacacgttcatgcttgttaccaatatataaaggatcgtttagaagtttttcgttgttcgtaccgacatcaagcacaaccgggataacacggctagggtcaataccagctgcagcagtgtaaacagctaatttaccgattgcgatattaataccgcctacaccccagtcaccgataccgagaatgctttcagagtcagtagcaacgataagatcaatatcgcctgctgtcgcgtgaaggttttcaaacgctttttcaataccgtcaatgttgtcgattgacaagtagattccttgaggtcttctatattcatggctgtactcctgaatcgcttcaccaactgttggtgtgtacacaacaggaagcatttcgcgaagatggtttttcagcaatttatagaaaagaacttcgttacggtttgcaagatcacttaagtaaacattttgacgaaggcggtcaggctgcgcttggaattgctcgtacgcgcgttgtgcttgttgatcaagagaaagtacagttggcggcagaagcccttctaagccgagttcttgtctttcttctagtgaaaaagcaacgcctttatttaaagtaggaatagataaaacttcttttcctctaagagttgtttctaagtggccttctttcgttttttttatgttattcaagcaaatctccttctttcttgaaatagttaaccaagttaagtaataacccatctaaaatatgaccgatcatgatctttatgcgactttgtgacaattattcgaacaatgtctcaaaactatttacattacgtaagctattgtatgcctgtcaaaatcaaaattcaagggaagaaaattacttaattttttaatatacttatttaaattttttaattgcatattatcagaatataaaaaaaacaccggtgtttttagccggtgcattctatctttatacccatgttttggactattttttagatttacctgggacttcgtgatgatgtctgcatcttgcttcatatgattcagatgcaccaaccaaaatgaccggatcatcgtaagaagcaggtttgccgtcaatgaggcgctgtgttctgctcgccggtgatccgcaaacagaacagacggcttgcagctttgtcacactttccgcaatcgccatgatattcgggacgacaccgaacggctctcccctaaaatccatatcaaggcctgctgctatcacacggtagcctttatcggcaagagatgataaaacctcaacaatttcctgatcaaaaaactgcacttcatcaaccgcaatcacatctgtactttcactgatgtgatcccaaatgtccgcagcagacgaaatggcatagctcgtcatcgatgttccattatgggagacaacagcagcttcgctgtatcggttatcaattacaggcttaaataccctgacttcctgcttggcataagttgctctcttcactcttctgatcagctcttcagatttccccgagaacatgctgccgcaaatcagctcaagccacccgctttgtttcattatgtacataggcttcgctcccctctctctgccagctgtgttttagacaatataaaaaacaggcaagactgctgcttgcctgttgagaaatctattattacttaagaccgtattttttgttaaagcgatcaacacgaccatcagcagaagcgaatttttgacggccagtgtagaatgggtggcattcagagcaaatctcaacgcgtacctcttcttttactgagcctgtttcaaattcatttccgcaagcgcatttaactgttgcttttttgaaattaggatgaattcctgctttcattgtatccatctccttccgccctgaatcccgtgtggaaacagagttattatttcggagcattgtccgaaacgcatatgagaaaattatatcagtgatttacttcttttgcaaatacaatttaccttcttgcagatgatagatttgcctgtttccattcttgattgagaatatcgaaaaattcctggtttgttttggtttttttcatttttctcatgaacttttctgcgaaatcaggtgaatcagacatcgttttgcggatagaccataaacgatcaagatgctctttaggcacaagcagctcttctttgcgcgttcctgaacggcggatatcgatagcagggaagatgcggcgctcggcaagagagcggtcaaggtgaagctccatgttgcctgttcccttgaattcttcataaatgacatcatccatacgtgaacctgtatcgaccagagccgtagcaaggatggttaagctgccgccctcttcgatatttctcgcagccccaaagaagcgtttcggacggtggaacgccgctgggtcaatccccccggaaagcgttcttccacttggcggaatcactaagttgtaggcgcgggcaagacgtgtgatgctgtccatcaggataatgacgtcttttttgtgttccacgagacgcatcgcacgttcaagcacaagctcggccactttgatatggttttccggcacttcatcaaacgttgagctgacgacatccccagctacagagcgctcgatatcggttacttcctcaggtctttcgtcaattaaaagcacgatcagctctgcttcaggctggttcgctgtaatgctgttggcaatttccttcagcaacatcgtttttccggctttcggcggcgcaacaatcaatccgcgctgcccaaatccaaccggcgccatcatgtccataattcttgtagacaagaagttcggctttgtttcaagcaccatttgacgatccggataaagtggcgtaagagccgggaaatgcacacgctcttttgcagattcgggatcatccccatttactgcttcaacgtgcaaaagtccatagtaacgctcattttcttttggcgggcgaaccttgccagatactttgtctccgttccgcaaatcgaaacggcggatttgtgaagctgagatgtaaatgtcttctgagcttggagagtagttgatcggtctcaggaatccgaaaccttcagactggatgatctcgagaacgccttccataaacagcagatcttcctgttctgcattcgctttcagaatggcgaaaatgagttctttttttgtcagtttgctgtaataggagattttataatgtcttgcaagttcataaagctctttcaatttcatattttccaaagaggaaatagatacgtctttcataaaaacaccacgcttttcatagtcaatatcttactctgaacatgtcatctgctgcttttgcacaacatccgccaaagcacattctttttttaacataaaggaacttctatcggtaacacttccacccatgatcggcgcttttgttaaaaggattgtcttaatgagttttgaaggaagcgaggacaaaaacatgagaagatcaatacttatatcgtctgtatgcggtagaaattgaaactttcctagtgcttaaaagaaggtattacgcagtaaaattcgcagcactctttatttttaccttatttcaaaaaattattcaactgaaataaggttttgacacggaattgatagagttgacgcttttctgcaaaagttaaagcgggctcacacccgctttttctgtttgttatggacggattacaagatttggtttctttttcaagctgtgtctgccgtcaacgaaacgaacagtgcccgattttgcacggataactaagctttcagttgtaccgacagagcctttgaattgaactccttttaacagctcgccgtcagtaacccctgtagctgcaaaaatcgcgtcatcacccttcacaaggtcttccatgcgaaggactttgcttaaatcaaggcccattttgtgacagcgagtgatttcttcttcgctttgcggaagaagtttaccaatgatttctccgccgagtgctttcagcgcaacagctgaaagcacaccctcaggagcgccgcctgatccgaacaggatatcaacgcccgtgtggtcgaaagccgtgttgatggcgcctgcgacatcgccgtcattgatcaatttgattctggcgccggcctcacgaagctcggaaatgattttttcgtgtctttcacggtttaaaattgtggcaacgacgtcctcaacgtccttgtttttcgcttttgccaccgctttaaggttgtcaatgacaggtgcttcgatgtcaatgcagcccaccgcttccggaccgactgcgattttttgcatatacatgtcaggagcattcagcagagtgccgtggtctgcgaccgcgatcaccgtcagcgcgttccagccgccgcttgctaagatgtttgtgccttcaagagggtcaactgcgacatccacgcgagggccgtacccgtttccgagtttttccccgatatacagcatcggcgcttcgtccatttccccttcaccgattacaacggtccctttcatcggcactgtatcaaaaacgtctctcattgcacttgttgccgcttcatcagcctcatcttttttcccccggcccatccatcttgctgatgccaatgccgcagcttcggtcacacgtaccaattccattgataaacttctttccatttcaacacgatctcctctcacaagaaaccattatgaattttgaagctgttctatttcttcgtcagtcattctttcccgccaaattgtcgctccaagcccctcaagcttcttctcaaggctgctgtatccgcggtcaatatgctccagtcccgtaatttccgtgacgccatcagccatcagtccggctaccaccaagcaggctccggcacgcagatcactcgccttcacttttgcgccttgaagctcaacaggacctgtgatgatggcagatctgccttctactttcatattggcacccattcgtctcagctcatcaatgtgcttgaatcttgccgagtagatggtgtctgtgacgacactcgtccctttcgcccttgtcaggagcgccgtcatcggctgctgtaaatcagtcggaaaccccgggtatacgagggttttgacgtcaaccggctttaagttcttctgcccgccgacaatgaggagctggtcgtcgcttgtttcgatatgatagcccatttctctcaactttgccgttaacgactctagatgagtgggaatgacgttatcgataatgacttccttgcccattgcagcccctgcaatcataaatgtcccggcttcaattctgtccggaatgatcgtatgcttgcagccgtgcagttccttcacgccgtcgattcgaatcacattggtgcccgcacctttgattttggcgcccatgctggtaagcaatgtcgcgacgtcaatgatctcaggctccttggcagcgttttcgatgatcgttttcccttctgccaaaacagcggcgagcataatgttaatcgttgccccaacgcttacgacatctaaataaatccgtgcgcctctcagcctttcagctcgcaaataaatggcgccttgttcattggttacttcagctccgagtgcttcaaagcctttgatatgctgatcaatcggacggggccctaagtgacagccgccaggcaatccaatgaccgcctgcttgaagcggccgagcatcgcccccattaaataatatgacgcgcgaagcttttttactttcccgttaggaagcggcatgctgatcatcgacgtagggtcaacaaccatttccccattctcaaaatgcacgtggccgccgatttcctttaacaggtcacgcagcgtttcaatatctgaaatctctggaagcccttcaattgtcacctcggaatttgccaaaatggttgcaggtattaacgcaacagcgctgtttttagcgccgctgatatgtactgtaccgtttaacgagtcaccgccggcaatattcaacttttccatgatagtctccttccataagaagatagctgcggagctaaataaaatgtcattttattctgtctctgcaaataaagctcatgtccaaaatctagccaattcgaagagaaagaatacaacacattgtaaaatatcaggaagaaaatagcgaagctttggggggtacaggtttcaaaagatgcacagagacccgccggctcgagagacatcgtcgtcatccggcaaaagcagtacgcatacccttcattccgatatcagcttctgcagcccaatgattccttctctgtaaagcggcgtcagcatctgaagatccgctgtatcaggtcggtgaaatacaaaggccgcggcaaacaggcataaagctgtttgccgcccctttcattatttgttccagtctgccaggaattgttcgattcctttgtctgttaacgggtgtttagtgagcgcatgaatgactttcagcggcattgtgccgatatgagcccctctaagagcagcttctgtcacgtgctgcggatggcggattgacgctgcaatgatttgcgtgtcaaggccgtgaatgtcaaaaatctgtttaacttctgaaatcaggtcaagcccgttgtggccgatgtcatctaaacgtcccaggaatggagatacatatgttgcccccgctctggcagcaagaagcgcctggttggcattgaagatcaatgtaacgtttgttttgatgcctaagtcagtaagtgctcttaccgcttttaaaccgtcagacgtcatcgggattttcaccgtaatgttcggagcgatcttcgccagttcttttccttcctcgatcatttcctcagctttcaaagaaataacctctgcgcttacagaccctttcacgacgtctgtgatctcgcgaagacggtcgtggaatgatacgttagcttcctttgctactaaactaggattcgtcgttacaccggcgagaattcctaattcattcgcttctctaatttcatcgatattggctgtatcaacaaagaataacattttcaaaaagcctccctgattaagaaattttctgaactgtgaatatgattgcgctttctaaagatagacggaaaaccgcctgtcaagctgtcaggcggctataaaaagttccaattgaattaagcttggtttgaagaaccaaattcacgcattttaccgataactgtttctttgatcgcttcacgagctggtccaaggtatttacgtggatcgtactcgtcaggcttagctgccaatgtttcgcgaacagcttttgcagaagaaatttggttttcagtattcacgttgattttagctgtaccaagtgaaattgattttttgatgtcagcagtcggaattccagtaccgccgtgaagaactagcggaagaccagttgattttccgatctcttccatttctttgaagccaaggtttggctcacctttgtaagggccgtgaacagaacctaatgcaggtgcaaggcagtcgatgccagtgcgctcaacaagctcttggcactctttaggatcagcgtagattacgccttcagcgataacgtcatcttcttgtccgcctactgttccaagctcagcttctacagatactccgtggaaatgagcaagctcaacaactttagcagttgttgctacgttttcttcaaatggatggtgagaagcgtcgatcattacagatgtgaaacctgcatgaatcgctttcgcacaagattcaaagcttgaaccatggtctaagtgaatcgcaacaggaactgtcactttgtactcttccataagtgcttttaccatagcaacgactgttttgaagccgcccatgtagcgtcccgcaccttcggaaacaccaaggatcactggagatttttcttcttcagctgcttgtaaaatcgcttgagtaaactcaaggttgtttaagttaaattgtcctacagcgtaccctttttctttagctgtattcaacatttccgtcatagaaactaaaggcatgtcgaatgtcctccttatgtagcctgattgtcttctagcgaaaaaagctttccaccctagcatgacccatatattgctgtcatatgtaaatactcagatcgctttttctccataactaggataccaacttttcgacaaatcggcaacataatgacatgattcatttgtttcttctttttgtcagttagacttcaggggcagatattttttgacggcgtctctgatttcgtcgatgtcaaacggcttggcgaagtgcgtcagagcgcccaattccttcgattcctggatcatgtcgagctctccgtatgccgtcatgataatgacccggatgttttcgtcaatgaccttcatccgttttaagatttcgattccgtccatgccgggaattttcatgtccaaaagcacaaggtcgggccgttcttttgtcacaatgtcaagcgcctgcaggccgttcgcagcctgaaacgtctggtagccttctttattgaacacttcatttagcaaaatacgaatgccgtattgatcatcaacgattaaaattttttcattcatcattttacaccccaatattatgattttcgtcaaaagtaagcagtattgtatgtattctgtttgattttcctatttcctttaattataatagtctactttacgacattttctgagcattttctcttttgttgtatactgatattgtacgttataaaggaggattcacttatgttgaaaatattcacgacgcagttaacaggtattttttcccgcattcaggataaggaatctgacgcgattgaagatggggcgcggctgcttgctcaagcggtgatcagcgggcattccatttatttatacggagcaaatgagctgcagggcgtcttttttgaggccactgaaagcaaagaacccttcccatctgtcaaagcctttccagaaagcgctgaggaagtgacagaaagcgacagggtgctgatgttttgctcagggacgggcacagccgaagaacaggcgctctcaaaagagctttatgaaaaaggtgcgggagtcgtatgcgtatcgcccgcagccaaagacagtgcgggaatagaacagtattgtgatgtgcatattgattctaaactaaaaatgccgcttgttccggatgaagacggcacccgttacgggtttccctctttaatgacagcactgtatgtctatcacgctttatcgtttacactaaaagaaattctgcaagagtatgcataatatcttattgtacatgctggaacttgccggaaacaaataaaaaagacttgcccgcttttgacaaacggcaagtcttttttattacttctgatttgcagcttcgacagacgctccgataaagcctttgaatagaggctgaggtcttgtcggtcttgacttgaactctgggtggaactgagaagccacgaaccaagggtggtctttcagctcgatgatttcaacaaggcgtccatcagggcttgtgcctgagaatacaaagccttgctcttccatttgctgtctgaattcattgttaaactcatagcggtggcggtggcgctcgtacaccacttcatcctgatacacttcaaaggctttcgtgccttcttcaagcttacaagggtaaaggccgagacgaagcgttcccccgagatcctccacatccttttgttcaggaagaagatcaatgatcgggtattgagttgacggatcaatttccgctgagtgggcgccttttaagcccaatacgtttcgtgcgtattcaatagacgccacctgcatgcccaagcaaatgcccaagaacggaatgttgttttcgcgcgcgtattttgtcgcgacgattttaccttcaacaccgcggtctccgaatccgcccggcacaatgatgccgtctgttccgcttgtgagttctgcgatattgttttctgtcacttcttccgcgttgatccatttcacttttacatctgcgtcaaacgcatagcccgcatggcggagagactcgacaacagaaatgtatgcgtcaggaagctcaacgtatttgccgacaaggccgattgtaatcgtttgagacaggttgctgactttgttaacaagctctttccattcggacatttccgcttctttgcatgccaatttcatgtgctcgcaaacaagcttatcaagcccttgtttttgaagctccagcggaatggagtaaaggttgtccgcatcttcacattcaataaccgcttttgtatcgatgtcgcagaatagcgcgattttatctttcatatcttgagaaatcggcatttctgtacgaacgacgatgatgtttggctgaatgcccaagctgcgcaattcttttacgctgtgctgtgtcggttttgtttttaattcgccagcagctttaatgtaaggtacgagcgtacagtggatgtacattacgttttcacggccgatgtcgctcttcatttggcggatcgcttcaaggaatggcagtgattcgatgtctccgacagtaccgccgatttctgtaatgacaacatctgcgtttgtctctttccctgcgcggtaaacacggtctttcaattcgtttgtgatgtgcggaatgacctgtacggttccgccaaggtaatctccgcggcgttcttttttaagaactgttgaatagattttacctgttgtcacgttgctgaatttattcaggttaatgtcgataaaacgctcatagtgaccaaggtccaagtctgtttcagcgccgtcatccgttacgaatacttcaccgtgctggtacgggctcattgttcccgggtcaacgttgatgtatggatcgaatttttgaatcgtcacgttcagtccgcggtttttcagcaaacgccctaatgaagctgctacaataccctttccaagtgaggatacaactcccccggttacaaaaatatatttcgtcatttcgtttgctcctctcttcgctcttagctacatttttaaaatgtactattttataaaaaatcatttagccttttaaatgatttataagaaaaatgaggggtgaaaataagaaagctccctttcaatttcttgaaagggagcataacgtactatgttctctcttcgtttttgaagagcccaaaatacatactacctagttcgactatgaaagtcaagatcgttttgaagatgaaatctgatactatttaatttcctcttcttcatcatcatagtcttcatcatcttcatcaataatatcttcttcgatctcaagatcatcgtcgtcttcatcaagatcttcttcgtcaaaatcgtcggcttcaagatcgagttcttcctcaacttcatccaaatcaaggtcgtcttcgtcgatctcttcaaactcgtcaagatcaagatcttcttcgactgctttcttcgcttttttctttttcgccttgactgtcggctgagtttcttcatcaagctgatcatacggataccagctgcgaagcccccacgtctggtcagaaagcgccaggaagcggccgtcaatgtttaaatctgtataaaattgagcaatgcggtctccaagctcttcttttttcacgccgagcaaagatgcgatttcatttaaaagctcctgaaaaggaactggttttttatgttcttcaaataattcgtgagcgatttcaactaaagccatttcctttagctcttcctgtgaatattgtttgatacccaaggtcggacactccctttctattacttatatgtatctgttttatcaataatgaaagcgattttgtatcgttcttatacaaaccatacctctcattataaacaaaataaaacagaatatgctacccttaacagcgttaatttaaataattttacaagagtgatccgactgagagatgttttccgttaatccgcgagcattctggagatgaccagtctttgaatttcttgagtgccttcatagatttgcgtgatttttgcatcacgcatatagcgttctaccggataatcttttgtatagccgtagccgccgaaaatctgcactgcttcggtcgttaccttcatcgccgtatctccagccatcagtttggacatggcggaagcttttccatatgggaggcccgatgattctaaccacgcagcctgataggtcaatagccttgaagcttctatcattgtcgccatatccgcgagtttaaaagcgacgccctgctgctcggcgatcgattttccgaattgctttcgctcttttgcatattgaagcgccgcatcaagcgctccttgggcgatgcctacggcttgtgcagctatgccgtttctgcctccgtcaagcgtcttcatcgcgattttgaagccttctccttcttctccgagacgctttgatgcgggcactacacaatcttcgaacatgatttccgttgtcggtgaagaacggatgcccagcttcttttctttcttgcctgtaaaaaatccttcaaaatccttttctactataaaagcggtaatgccttttttctttttctcgggatcggtgacggcaaaaacaatgtaaatatcagcaacgccgccgtttgtgataaacactttggaaccatttaacacatagtcatcgccgattcgttcagcagttgttttcatgctgccggcgtcagagccagaccctgcttcggtcaaagcgaatgcgccgattttctctccgagggccagctgtgttaagtactctgtcttctgttcctctgtcccaaaggcaaacagcggccagctgcaaagagagatatgggcggaaagcgtcacaccggtggaggcgcacacttttgacagctcctccaccgcgataacgtaggccaaatagtcacttccgattccgccgtaatcttcaggccacggaattcccgtcagccccagatttgccatttcccgaaacaactcgcgatcgaagcgttcttgttcgtcccgttctgccgctgtcggggccacctcatgcttcgcaaaatcgcgcaccaattttcgtatcatctggtgttcttctgataatgaaaaattcattgcttctcccccattttcagatcagcgcctaaaacggattgagccagaagctcgacgacatcgtacgttttgacttggtcttcggcttccttcgcctttgtgccgtccccaagcatcgtgagacaatacggacagccagaactgatcaccgatgggttgactgcgagcgcttgctctgtcctggcgacgttaatcctgttgcctgtttcttcctccatccacattaatcccccgccggctccgcagcacatgccggtttcccggtttctctccatttcaacaagctgcacgcccggaatggctttcaaaatctctctcggcggatcatagacttcattgtaccggcccaaatagcacgaatcatggaaggtaatcgtctcatgaagcgggtgctgcggtcttaattttccgtttttcacaagctcggccagcacttctgtatgatgataaacctcgccttcaaatccgaaatccggatattcgtttttaaataaattgtatgcatggggatcgatcgtaacgatttttttgacatcatttttttcaaattcagaaatattcttctcagccagctcttggaacaaaaattcatttccgaggcggcgcggcgtgtctcctgaatttttttctttattgccgaggatcgcgaaggacacgcccgcgtgattgagcagcttggcaaaggaaattgcgattttctggcttctgttgtcgtaagaccccatggagcctacccagaaaaggtactcaaattcttttccttcttttttcatttcttttacagtcggaatctcagcatccggcgcctcgtcacgccaattttcacgttccttgcggttgagtccccacggattcccttgccgctcaatacttgtcattgcgcgctgggcgtcactgtccatttttccttctgtcagtacgaggtagcggcggaggtcgatgattttatccacgtgctcattcatgaccgggcattgatcctcacagtttcggcaagtggtgcatgcccaaatttcttcctctgtgatgacgtcgccgatcaagcttggattgtaatcaagcgccgctgcggcttcctgcgatccgctgcccgctgacgaagcagccagctgattgcctctcgtatgccgaaacgctgctgcgggcacccatggggagcgcgaggtgacggcagcgcctttttccgtgagatggtctctgagacgcaaaatcaagtccatcggagaaagcatttttccggtgcctgttgcaggacacatatttgtacagcggccgcactcgacacacgcgtacagatcaagcagctgagaccgtctgaaatcctcaatttttcccgctccgtagctttctttcgtttcgtcggtaaaatcaattttttcaagttttccggcagattccattcgattgaaaaagacgtttgccgggccggcgattaaatgggcatgcttcgactgaggcacgtacactaaaaagctaagcaagaacagaagatggatccaccatgcgatatagaaaatcaccgccgcgcctgttttcccgacaccgctaagcataaacgcaatacctgaggcaattggctcgctccaagaaagcccatgctcatgccaaatcagattcatcccgttcccaagcagaacggtcagcattaatcctccgataaaaatgagaacgagtccggctttgaaaccgcgtttcagcctcacgagcttttcgatataacgtctgtagaatgcccacccaacagcaattaaaatgagaaacgtaacaatttcctgaaaaaaggtgaaggcgggatagaccgggccaagcggcagattccggccgggagccagtcctttgatgataaagtcaattgctccgaactgaaccaatataaatccgtagaaaaacatgacgtgaatgattccgcttttcttgtccttgagcagttttttctgtccgaatacattcacccatatggcgtgaagcctttccttgaaccgttgatcaaattgttctttctggccgagcttgatgtaggccagtctcgttttgaccaagtacacaaacaaatagacaacgtaagcggttacaatcagaaataataatgcatttgcgatgagaaagccgctcattccaattccccctttttactgataaagaccgcgatcccctacccccgaatctgtataagattatctttatgataaataatgaatgagtgttcagtcaataattaaattcctgctgttcgggcacactacctttactacggaaaggagtgccggtatgaaggtatttatcgtgattatgatcattgtcgttattttctttgccttgattctgcttgatatcttcatgggccgtgccggatacagaaaaaaggcgtacgagcctgttttttcaaaaaagaagagtgacatcgaattgatccactgcggcgctgatctcgttgagcggatgatgaatgatattcgccaggccgcctcttctgttcacatgatgttttttattatgaaaaatgatgaggtcagccacaatatgtataccttgctgaaaacaaaagcccaagctggcgtatccgtttatttgcttctggattgggcgggctgccgggcaattaaaaaaacggcgctgcagacgatgaaaaatgccggcgtccatgtccatgtgatgaatcgtccccgttttccttttttcttttttcacatgcaaaaacggaatcaccggaagattacggtgatagacggaaaaatcggttatatcggcgggtttaatatcgccgaagaatatcttggaaagaaagcgaagttcggcaattgggaggattatcatctgcgcatgatcggagaaggcgtacatgatcttcaaacgctttttgcttctgatctaaaacgaaataccggaatcgaactgggttcggatgtttggccaaagcttcagcaagggactatttctcacaagatatatgcgaccgacggttattcccttgaaaacatatacttggccaacattgcccaagcgaagaatcgccttacggtttgcacgccttattacattccatcaaaaccgcttcaagaggcccttattaacgcaagaaaaaacggcgtatccgtgagaatcattgtaccgatgaaatcagaccatccgctggtacgagaagcagcttttacgtattattcggagctcttggatgccggctgccttatttatcgttattatcaagggttttatcatgtaaaagccctcatcatagacgaccatctcagcattatcggaacagccaacttcgataaacgaagcctgttcttaaatgaagaggtgaatgttgaaattgatgacgaagcgtttacaagtgaagtctatgccacaattgaggaggatatgaaaaagtcggagctgctgacgatggaggatttcagcaagcgcacattcaggcagcgcccggcggaatggctcggcagggcattatcttatttcttataaaggagagttcctatgattttcagattcgggttcgtttcaaatgcgatgagcctttgggatgcgtctcccgctaaaacattgacattcgcgcgttattcaaagctttcaaagactgaaagaaaagaagcgcttctgactgtgacaaaagccaatttgcgcaatacgatgagaacccttcactatatcatcggccacggcattcctttgtaccgtttttccagttcgattgtgccgctggctacgcatcccgacgtgatgtgggattttgtaacaccgtttcaaaaagagtttcgggagattggagagcttgttaaaacccatcaactgcgaacaagctttcatccaaatcaattcactctgtttacgagcccgaaggaatccgtcacaaaaaatgcggtaaccgatatggcgtatcactaccgcatgcttgaggccatgggcattgctgatcgctccgttatcaacattcatattggcggcgcttacggaaataaagacaccgccactgcacaatttcatcaaaatataaaacggctgccgcaggagatcaaagagcggatgacacttgaaaatgatgataaaacatatacaacggaagaaacgcttcaggtctgtgagcaggaggatgttccgtttgtctttgactttcatcatttttacgccaatccagacgatcacgccgacctgaatgaagcactgccccgcatgatcaaaacgtgggagcggatcggccttcagccaaaggttcacttgtcttccccaaaatcggagcaagcgatacgcagccacgccgattatgttgacgccaactttttgctgccactgttggaacgctttaggcaatggggaactaatattgatttcatgattgaagcaaagcagaaagacaaggcgcttctccgcttgatggatgaattaagctccatccgcggtgtcaaacgcatcgggggcggtgcgctgcaatggaagtcataaatgtgcaaaaataggtttacgacttgtcagctttgggaacttaggctatataagacaacaatcgatggaggagaaagatcatgaaaaatatcaagtctctgaaagtagccgcacaggcctttactttaagaaatttgattcatctttataaaatgtgccattccggaagccacgaggtttatatttattcaaagaaaacgatgtgcaaaatcaaaagcttaattgagcttgaaacgttccgcatggctcataatgaaaaggaatatctgatcgtagttgaaggaacaaaagcatcacagctcattgaaaaattccaaaatctcatcgagcctgctgagagagaagcgctctaacttacatacaaaaaaggatagacatctgtctatcctttttcttatgctcttacataatggagctgaaccgcttgtccaaattgttttgtcccttttaaccgcagttttgtttcatttgttagttcgtgaaacagcgggatgccgcttcctaaaacgacgggaataacagtgatgatgaattcgtcgatggcatcttctttcataaagtcattcacaagctctgccccgccagctatccagatgtttgagcctttttcctgtttcaaacgggcagtgaaggctctggctccctcattgataaacgtcacatgttcatcttgataactgtcgggcgatcctgtaaaaacatagcaggttttatcctgatacgggaaaaccggtgttagcactttaacgtgctcatatgtgctccgccctaaaatgactgtatcaacagtctgataaaaatcactgtagccgttgtcaccttcaccttcaaattcatccagccaatcgatgcttccatcttcttttgcgatcatcccgtccaatgaaacagcaatgtacagcacagtttttctttccatgttctcctcctatcgatgcaccatttgcccgaattgcgcttgatgcagcctgctgtataggcctccggcttcgatcaggtcttgatgacggccttgttcttcaataccgttgtttgtgacgactacaattctgtccgcgtctttgattgttgccagcctgtgggcgatgacaagcgtcgtgcgcccctcagacaactcttgaagcgccttttggatcgccgcttccgtctctgtatcaagggctgaggtggcttcgtcgagaatcaagatcgacggatttttcaagaacatccttgcaattgacagacgctgtttttgcccgccggaaagcttcacgccgcgttcgccaatcatagtatccaacccatcgggcatgttatggacgagctcttccagatgcgcctgcttcacagcttgccaaatgtcttcttctgatgcgcctagtcggccgtaggcgatattttctctaagcgtgcccgagaataagaaaacgtcctgctgcacgacgccaatctgcccgcgcaacgaagaaagcgtcatgtcttttatactgatgccgtcaatcgtaatgtcgccctccgatgcttcataaaaacgcggaagcagactgcaaagcgttgatttcccagcacctgacggaccgacgaacgccaccgtttcccccgcttgaatggataggttgatgtcattgaggacattgtgatggtcatcatagccaaacgaaacatgtttatagcggatattgcccttcaggccggaaacatctctcgcatcaggtgaatcctgaatgtccggctctgtctccatgagctccatatagcttttgaaacccgcgatccccctcggatacatttcgataatggcattaattttgtcaataggcctgaacagcacatttgtcaggagcacaaacgccacaaattccccgtacgataaggagccgcgaatgacaaaccacgtcccgcacaaaaggacaaacagcgtgacaaaccgggtcagcatatagctgattgacccgtttttcgccatgattttgtaggaagaaagctttgtgacacgaaaacgctggttgttgacggcgaagcgttctttttcaaacgcttcatttccgaacgcctgcacaagccggatgccgccgatgttattttctacacgcgcgctgaagtctccgatatccttgttcagcgtggtaaatgctttggtcatttttttgttgaaataaagcgctagccaaatgacgatcggcataatgataaacgttaataaagcaagctgccagttaataaacagcatcactccgaacgccccgagaatggtcatgaccgcaatgaataagtcttccggaccgtgatgggcgacttcaccgatatacattaaatcgttcgtaagcttcgacatcagcgttcccgtcttgttgttgtcgtaaaatttgaacgagagcttttgcaaatggtcaaaaagcgactttctcatatcagtctcaatattgataccaagcatgtgtccccagtaggtcacgatatactgaagagccgagctgagcgcgtacaccgcaaataacccgattgaggtcgcgatgatcagcccccagtccctgcccggcagcaaggtatcaataaaataattgacaatcaaaggaaaactcagctccattaaacctcccgcgatcgctgagaaaaagtcgagaaagaacaacgttttatatggtttataatatgaaaaaaattgccgcagcaccctatcttcccccaatgtataaataactgataatatttctcaattatactatacacgggctgttttgaaagatcagatttcttttttcttacagaacacctgaaaacaggcgggcaaatgactcttttgtccggtcagccacgcctcttttataaaagccgacagggctgagcttttcactttcctgcatatcctcttcaaaatggacctcaagggttcggatcgcttcggcatccgtgaagaacacattcacttcaaagttgagctgaaagctgcgcatatccatattcgcggtgccgacggaggcgagatcgccatcaatgatcatgactttttgatgcatgaagcctttttggtaggagtacacttcaatgccctcaaggagcagctccgggaaataggacctcgacgcgtattgggtcaaaaagctgtcgttcttctccggcaccataacccttacctctaccccctttgtcgccgctgcttttagcgccgtgcgaatggattcattggggacaaaatagggcgtggcgatccatattgatttctgcgctgaagaaatcatttcataataaaggtcgctcatgctttctttcatgtcagggcctgtcgcgacaatttgataaatgcctcctccttccacgggaaccggggtattgtactcctcttgatcaattagcacttcattggagacgtattcccaatccagcataaagatagcgtggagcgtttgcacaatttccccctcaagccgcaggtgtgtatctctccaaaatccgatgtgcggatctctgctgatatattccttcccaacatttaatccgcccacaaaaccggttttcccatcgatgatcacgattttccggtgatttctgaaattcagcttctggttgaaaaacccgtatttcagcggagaaaacgggacgatgtccacccccgcttgtttcattctcataatatctcttcttgccagcttcatgcttcctgccgcatcgtataaaaacctcacctcgacaccctggcgcgctttctccatcataatatccatcatgccgcgtccgagcatgtcagatttaaacatatagtattcaatatgtatgtaagattccgcttttctcattgctttgaaaatgtccgggaaggtttcttcgccgtttttcagcactttgatgttgcttttcgtattgatattcatatgggcagccctgatggaatatgtaaagaacctctcttgattgtccttcagccctgtcacttcgggcgtttccttcttgtcaaacagcttcctgagcttttccctgttgtacattcgttttgtcttaaacagctttccctttacataaagctgtcccgaaaacagataaaacacgtagccgacgattggaaaaaagacaagaatatggatccatagcagcgtgtgctgcgaggtgcggttttcaagaattaatgaatagatgctgaacaaaataatgcttatatagcaaagcaatcctccgtaaaactcaagcctggaaaccggaaaaaaccaaatgacatatgccccgatgagcatcatatataaaaagaaaaattccagtctccttttcagcatcctgattctctccaatctgattcaattacctctgtattacctcttttttctaatcgataaaccttgtaagtaaataacctctccgccgaaggaggagaggtttagaaaaactaactgtcacggaattcatccgcatcgtttctgcagaaataaagcaagactattggcaacgccgagtgaagtctgatgatacaacatgagcggcaggccgaacccgctcagcactccggcaagcgccgaaaaagaggcggcgctgtgactgcaaatacggtggatagagtgaatttgatgcccactctgatgagagaaaatatataaaacgggatattgatcagaaagatataaggagttagtcaggctgagtcataatctgctgttccgccggtttaaaatgagtaaaatccgttttattcttgatcttatttccaaatacaaacacaacaggattcccggccgcccagccattacctttgcagaaaaaaccccctcctgggggggattttcatgagcgtttccgatatacaacgtagctgcgggtcagatacttgagcggcagactgaacacatgaaccaatcttgtaaacggccacaggataaaaacgacgtatcctatcacaatatgaaacttaaaccatagcgggacactctccatcaaagaggcgtcaggccggaacaaaacgatttccctgaaccagggcccgactgtggtccggtaatcaaatcctttcgaatcaatgttgagaaacgtggccgcaacgcccgacagcatcatgaacagcagcaggagcagcgtaaggatatcggatggcgagctcgttttgcggattcttttgtcaaacagccttctgtacgtcaggatgacaagtccggtacatgccgcaatgcccgccggcaagccagcgccaatcgccattttgtgatacatatgctctgaaatgccaagggaagcatacacgccttccgggatcagaatccccatgacatgcccgccgacaacgcacagcagtccccagtgaaaaagtgtgctgcccgccgcaagttttttcttttctaacatctcgcttgatttcgccgtccagccaaattggtcatgctggtagcggtaaatatggccgccgataaagattgtcaatacaatgtatggcataataccccagaggatctgcccgctcatgcctgaacagccccttcaacgctttcacgtacgccaatgttttcaagcgcggccagcagcacgtgcagcagttcagcgtatatactgtcatttttttcgagacgggatgccagctccctcacattggacagatatttctcaaacacgcttctcgctgcttcaatttctgcagccgcagcaaattccagcatcagcggcagataatcaggcagctctttctctgtcggcaggaaaccggattgctcgtatgtgttttttaaatgcagcaattcaacgccgcgttccctttgctcgcccgagttaaagtaggtgacatacatatttgtttttttcccaaagtcgaacgtatagacatagtgttcaatcagcgcttccggtgaaaagctggctgacgcctcgaaaaagtgcagcagcttctcccggatttgccggttgctgatttcatggataagagccttccaatcgggaatctcggctctccactcttcatccggataagagagaagagaggaaagagcggagaacgtcatttgccggtctgtggtgttcatcttgttacacctcatttatcaaaagttagaaacaggagccggggccgcctgaaaatgataagccgcagctcccttgttcagcatataaatctgaaacttcttctcgatgactgctcggtatcacaaagcggtcatcatatttggcaatcgcaagcagccgatacatatcttcaatttgctgttctgttaagccgacactggagatcagttccggatcgattgatttattcgtctggatcgctctcatatactggcgcatgacagacattttctttaacgttgaccgaatatgatccgtatcaccggctgttaacagctgcgccaaatagtctatcgggattctcatttggtcgatagccggaaaaatatcttccgcggattgccggctgccttttccttcaaagagattcataatcgggctgagcggcggaatgtaccacaccatgggcagcgtgcggtactctggatgaagcggcagcgcaatcttccagtcaatgatcattttatagatcggcgattgctgcgcagcctctatccattcagccggaatgccttgttcttttgccagcttggcaacctcaggatcatttggatcaagaaaaacgtccaattgggaatggtagagatccttttcattttcaacagatgccgcttcctccactttgtccgcgtcatacagcatgacgccgaggtagcggattctgccaacacacgtctcagagcagatggttggcagtcccgcctccaaacgcggaaagcagagtgtgcatttttccgctttgttcgtttgccagttaaaatagacttttttataaggacaggatgagacgcaatatctccatgaacggcatgcgttttgatccacaagcacaatgccgtcctcctcgcgtttgtacatggcgccggatggacaggatgagacgcacgccgggttgatgcagtgctcgcaaatacggggcaaatacatcataaagacctcatcgaattctgttttgatcgattcctccatcttttgtacgttgggatcttcaagtcccgttatgtggccgcccgcgagatcatcctcccagttcggtccccattcgatattcataaaatcccccgttaaggacgatttcgggcgtgctaccggctggtgttttttctgcgggctgttcgttaatgtttcataatcatagttccagggctcatagtaatcatcaatcgacggctgattcggattatagaaaaggcctgcaagccgattggttttcgagcccgatttcagctcgagctttccttttttcaatgtccagccgcctttatatttgtcctggtcctcccattgcttcgggtagccgatgcccggctttgtttctacattattgaagtacatatattccgcaccggaacggtttgtccacgtgtttttgcaggtgacgctgcacgtgtggcagccgatgcatttatccaagttcatgaccataccgatttgcgctttaatcttcaagccaatcgacctccttcagcttgcggatgacgacgttcaggtcgcgctgattccccgttggaccgtaataattaaagccgtagctgagctgggcgtagccaccgatcatctgtgtcggcttgacgtgaatccttgtcgggctgttatgggtgcctccgcggttattcgtcagctttgtgccgggcacgttgatgtggcggtcctgggcatggtgcataaacgccattcctttaggaatccgatgagacaaaacggctctcgcgacaacaacaccgtttcggttaaagcattcaatccaatcgttgtctttgatatccgtgtcctctgcatcatctttattcatccacacggttggcccaccgcggaacagcgtcagcattggcagagaatcaaaatacatgctgtggacagaccatttattatgcggcgtcaaataattgaggacgatttcttttccctcttgatcaggccgcttgctcagaaacgggcgatgctggaggatcggtttgaatgtcgccatcgtttcaccgaattccatcatcagttcatgatcgacataataggattgtctgcctgtcagcgtccgccacgggattaatttttcaacattcgtcgtaaacggcgaatacctgcgccctcctttttcagagccggaaaacgctggagacgtgatcaccgttttcggctgggctgtaatttgttcgaacgtaaagcactcttcctcgcgttcttccgccaggtctttcagcttcaggttcgtgatgttttcaagtgattcccatgctttgacggcgacctttccattcgaagtggatgatagggttaaaaccgcttctgccgcctgctttgcttcacttatatttggacatccctttgccacgctgtctgaggtgatttctcccagtctctttttgagtgattcatattcatcggctattgaccagctcatcccttttgttccgctcggctttaaagcagcgttaggaccgagtgcggtcattttatgaaaaatgtgtttgtaatcccgttcaacgacttggatgttcggcatcgtttttcccggaatggcttcacattcgcccttgctccagtcattgattttgccgaatggctgggccaattcctgcatggtgtcgtggaggagcggcgtcgcaaccacttctttcaccggctccatattgacttcttctgccagatcggaaacggcttttgacagcgccttgaaaatatcccagtctgacttcgattcccacggagctgagatcgccggagcaaatggatgaatgaacggatgcatatctgtgctgctgagatcgtgtttttcataccatgtcgccgccggcagcacgatatcggaatacagcgccgtacccgccattcgaaaatcaagattgattaataagtcgagctttccttccggcgcctgctcccgccatttgatttcttctgggcggatgctgtcgctgtcgtcattcattaaaccgttcgttgtccccagcaaatgcttgagaaaatattcatgcccttttcctgagcttgagatcagatttgcccgccatacaaagagattccttgggaaattcacttcattgtcaggatcttcaatcgcgaatttcagttttttctcttggagctgtgaggccacgtacgcacctacgtcttcaggtgttgctgcccctgctttttcagcttctttatacagatcgatgccattttgattgaaagtcgggtaagacggaagccaccctagccgcgccgccagcacattgtaatcagcgtggtgcttgtagcgggatgacgcagcaatcggtgatgccaaatcactgatcggctggtcctcataacgccactgatctgtcgcaaagtagaaaaatgaagtgccgttttgcagcttgggcacgccctcccagtcctttgcagttgcaatcgtctgccatccttcagcaggtcggagcttttcctgcccgacgtaatgggcccagcctccgccatttacgccttgggcgcctacaagcaaaacaagatttaacactgctcggtagatcgtgtcggagttgaaccagtggttaatgccggctcctacgataatcatagaccggccgtctgtatcgatcgcattttgagcaaactctctggcaatcttaacgacagcttcttttttgattcctgtcatttgttcctgccaggcaggcgtaaacggctcaggatcatcataggagacagcttgttgttcgccgatgccccgatttacgccgtagttagccagtatcaagtcaaacacggtcgtgacgtacgtctcttcaccgttcaggttcatttttttaataggaagatcccgctcgagcactttgtttccgtcatttgaaaaatacgggatgcgcaccgtgccgatttcatcctctattccgagcacagagagacggggttcaatcggttccccggtttcttcatcaatcatgtgcaggttccatttctgctgcccgtcccagcgcgagcccattgtcccttggggtatggcaaatgaacttgtctgttcatcccaaaccgcaggcttccactgatcatgctttgtcttccgcccgatgtccttcgcatgcagaaaccgtcccgctgtgtatacgccattttcttttgacagagtgacgagaaatggaaaatcagtgtattgcttcgcgtactcaataaaacgttcagtttcttggttcacgtaaaattcctgcagaataacgtgacccatcgccatcgcaagcgccccgtcagtcccttggcgaatactcagccagtcatccgcgaactttgaggattccgcaaaatctggactgatcgaaatgaccttagcgcctttatagcgggcctccgccaaaaaatgcgcgtcaggcgttctcgttaacggaacgttggagccccatgtgataatatagccggaattgtaccaatcactgctttccggaacgtccgtctggtcaccccaaatttgcggggatgctggaggaagatccgcataccagtcataaaaactgagcatagggcctccgattaacgacataaaccgggagcctgatgcgtggctgatcatggacatggccggaatcggagaaaaaccgacgtttcggtcaggcccgtatttcatcactgtatacagcagagaggctgaaatcagcttcagcacctccggccattcagcgcgcacaaaaccgcctttccctctcgcctgtttataggacttcgctttttcagggttttcgacgatcgatttccaggcttccaatggattttgatgcgtctgcaatgcctcccgccacaaattgatcagcacaccgcgcacgtatggatatttcacacggagcgggctgtagatataccatgaaaaactggcccccgcgggcagcctctcggttcaaaatcaggcatatccgggcctgttgatggataattcaaattttgcccttcccacgtgacaattccgtttttcacataaatattccagctgcaagaccctgtacagttgacgccgtgggtggagcgaacgactttgtcgtactgccatctgtttctgtatacattctcccaatcgcgatcctcgcgggtagtttggctatgtttatttgaatggtgttcgataggagagaaataattcaatctcctaaacaacggactcattttctttttcttcatgagagttcactccttccgagtcaggtgatgctaagttcactataaacagagacagcgtgttttcttgtgaactatgtcacacactctgcttttttcacaaaatgttcacacaaaggagaaggaaggctgagttcaggcaggacgcttgggtcattagctgcctttcattcaaagatcaaaaaaaaccggctctatttaagaaccgggctcggcgttttcatcctgtgatgtatgcagataccgcaaaaataattgataggaacaaaaaacattttgctgaagcatagccaaaaagttcatttgcagctgcggatgataagacatcattttcttaaatatgtaatatgggatgttgagaatcagaatgtctgaagtggcattgactgagataaagggcgataaataaagcccgcctttttcatcaatcggaaacacatcgcctttttcccacagcgcaacggttttcgacccttcagggagccttgtgtccataaaacggacactgccttttaatacaatataaacagattgagaatgaagaaaagatggagactgatcacatgaaccgcggataaacgtgccgtttttcagcaaggtttcgacaatggatagaggcacttcattaaacataggaagttgtttcagaaataataaatagtcacactgattcataggaaaacctcctgtgctaagctaaggatagctttagtgtagctcgactgagcctgtacagcagtgatgtatttcacagcctgtatgatgaatgtcacttatcaggagggtgaatgcatttataatgaaagaaaaaaggaggatttcgatgaaggcgctgattccgaagcagcacggggcgtgggcgatgctgctgatcccatttttactcggcatggtcaagggaggccccgttatttggcatattccgctcttcctaggctggcttttcctatacttagcggtttatcccgttacgcttgccttaaaaaagaaccaaagcaaaccttatcaaaagtggatgtgttattacggttttcccgcctgctgctttttgatgatctcggtctttcataagccgcctctcatctgggtgggcgtttctttactgccgctgtttctcatacatatgtattttgcccgcagaaaaaaagaacgagccctattgaatgatgttgcaggtgtcttgttcttttgttcgggcgggtttgcgagctgctggctggggatgggaaccctcgacggctgggcttggtttattttcttgcagtctgctttattttttatcgggagttccttttatgtgaaatcggtgattcgtgaaagaaaaaacaggacatttgcatactggtcatggggatatcacctgctgctcccctttttatccgctcttttcggagcaggatgggcgtttctcgcttttatcccgagcagcttgcgggcatggttttttcatggaagggattggcccgtaaaaacgattggcattctggaaatcgtgaatgcctgtttctttcttgccgtcatgtgcctgtttatcacaaggtaaaaaaacaaggacaccgctgtccttgttttttcagtcaatattgcaaatctccagcgggcaattttcacactcaatctcacatcgtaaatagtcccgcttgtgcaaaataatttttccggattcgtctatcgaaataaccccttttttgcggagatctcccagcatacggttgatgctttcccgtgcagccgcacaaaactttgccaaatcctgatttgtcaggacaatgttaatcagaatgccgtcgcttcgctccactccgtagctgtttgataagcggataagggtagaatagagcgccccctttttgccatgaagaagcagatccctgattttggactgaatcttccggaggtgcgtgctcatccatttcatgaactcaaatgtcaaagcgccgttttggattaattctttttccagcttatttttattaatgacgagcacctcgccatcctctagtacttttgcactgagcatataccttggttcttcagtgaaaagtgttaattctccgacgatatcatgcttttggcagattctaagcgtcaggtcttttccgtcagatgtcagcttgccgatttcaatgagtcctgattgaatcagataaagctcttctgcatccattccttcccgaaacaaatacgtgtgtttttccatttttcttttcgtgctgatcgattccagcaattcatacagatcgctggatatatgatcactatcagatggtcgaacagagagaaaattcatgagctcacctcgaagaaagtcacgttgtgtgtttattgtaacgtgaattgatttgtacccatcgagaaaaaactaacaatcttgtgaatgccccagtgttagttgatgctctggctgtttctctccgtgtgtgttttcattctttcctgccaatacatccatatgacaaggacaaaactggctaacgccacctctgaaagcgccataaacccgatcgcgtactggcctgttgcctgaaatacactcgccaatatgagcggaggaaaaaagccgcctaaaccgcccatggcagacacaatcccattggcaatccccgcttgcttcgaaaaatagaaaggaaccagtttaaaaacagtcccatttcctacgcctgagcagacggccacggttaatgatccaaacgtataaaggccgattgtcggcgagaacgataggataatgcctgataatgtaagcccggcaaaaacaaacatcaagatgcggagcgggctcattttatcagccaggaatcctcccgcaggcctgagcagcgtagaaaccgcaataaagccagccgtccgcaagccggcatctgcaggattcagcccaaaatgctccaccagaaagttcggcagatagatagtgaaggcgacaaaggcaccgaacgtaataaaataaaacaggctcagaaaccatagcacatgatttcggtaaacagctttgatttgagtcttaacagaaactttgaccttcttctcatgcctgtcgccaaacaatacgtgcagtaaggcaaagacagacagcaaaatcagatacatttgcacggttgatttccacccgacggcttgagcgataaccggcgctgcaaatgtcgtaacggctgtcccgatatttcctgcaccgtaaatcccattgacgacaccgtgcttttctttcggataatatttcgggagggaggtcaccccaatggaaaacaccgctcccccgatccctaagaaaaagccgcctgcgattaaatcaaacagagaatccgcgatactgatccaaaatacaggaaataaaagcaggatgaaactgaccataaacatgagccgcgcgccaaacctgttcgttaaataccctaaaggaatgcggagaagcgacccgaggatcacaggaatcgccgtcaccaaagaaatctcacccttgcttaaatgaatatctaatgtgatttgggaaatgagtgatgaaatcagcacccaaaccataaaccctgccaccaagcttaatgactgtaacgataattgaatgtgttgacggttgatcatttggcttgcccctttcaatgattcaataatcagtcttatcatacaaaaactcggcaaacaggattgtgaattacatcacacgtttttctcataaaaaaaggacaaagcccgaagactttgtccttttgatcgtgattacattttttccggagccgatacgccgatcagctgaagcgcattgttcagcgtaatttgcgttgccttcattaaagccaggcgcgcgcggctcttctcttcattttcagggtcgatgactttctctgcgttgtagaagctgtgcagagcagaagccagatcataaatatagtttgtgacacggtgcggaattcgtttttccgctgcttccgccactgcctctgggaagccgccgatcgttttcagcagatcgtattctttttctgattgaatatggctgaaatcaagatctgccgccggtttaagtccctgctcttccccttggcgaagcatgctgcaaatacgggcatgcgcgtattgtgcataatacacagggttttcgttagatgttgatacagcaagatctaagtcaaaatccatatgggtgtccgcacttcgcatcgcaaagaagtaacgaacggcatccaagccgacttcttctatcaggtcacgcatcgttacggctttaccggtccgtttgctcattttcattttctcgccgtttttgtaaaggtgaacgagctgaatgatttctacttcaagcgttcctttttcatagcccagcgcttcaattgccgctttcatacgcgggatgtagccgtggtgatcggcgccccaaacgttgatcagcttatcaaagccgcggtcaagcttgtccttatgatacgcgatatcaggaagcaggtacgtgtacgtgccgtccttcttgatcaatacgcggtctttatcatcgccgaacgtcgtggaacggaaccaagtcgcgccgtcttcttcatagacatggcctttttcgcggagcgcttcaagcgccgtgtcgatttttccattttggtacagtgaagtttcggaataccacacatcaaacggcacacggaagttttccaagtccttgcgaagcttgtccagctcgtatttcaggccgtattcacggaaaaacgcgaggcgttcactttcctcttcgttaacgaaacggtcaccgtattcctcagcgagacgctttccgatcgcaatgatatcctcgccgcggtagccatcctccggcatcggtttttccaatccgagcgcttcaaagtaacggacttcaacagaaagcgccagattgttgatttggtttcccgcatcgttaatgtagtattcgcggcttacatcgtaacccgcttttgaaagcacgttgcacaaggaatcgccgacagccgcccctcgcgcatgcccgaggtgaaggtctcccgtcggattcgctgatacgaattctacctgaactcgttcaccgtttccgatgttcgtttccccgtatgcttcccctgcttccagtacagacggaatcagctttgttaaatattgattgttcatatagaaattgataaaacccgggccggcgatatccagtttttcaatcgaagcctttcctttatcaaaatgggcgacaatctcttcagcgatttggcgcggcgctttttttgccactcttgccagctgcatcgccatattcgttgagtagtcgccgtgtgttttatctttcggtgtttctaaaacaacattgggaatctggctttcttcagccagtcccgctttcagaacggccgctttaatttcttctttcagcacgtccttcatttgttccgcaatgttcatgcgtgagttcctccctcatacgtgatcgtcatattatgtaaatgctcctgctcgtctccgacatgcatgtcatatgcgatgctgatacggcctttttcttcatcgagatcagattgaatcgattttgtgcttgttttcagctcaagctcaccaaatgacattttatatttagcaattgtggaagctcccgttacgaaacgctgattcattttgacagcgcctgacctcatgaccaggacttcgccttcgcttactttcacaatcgttttgactttgcctaagtcgtgttcttcataataagatagatacactttattttgttttacatagtaaaatccggtggtgcggaattcgatgacttcttggtttccgtcatcctcgatcacagacttcacatggagtgttatcggtgtctcttgcttcattctgacacgtccttttcatcattccactttgacttgaatagtataatcattcggtttgtaaacttcaactgcttctatcttaccatcattgctcatcagatttgaagataaacctcataaaaagcatttccttatatagaagagaaaatcatatcactaattacctttaggaaatgttacatttttccgaaatctatcatttccttttcacatttttttcaaaatatatgtattgaattagtaatttgatagttttaagataaaagtacaacatagatctgctagaaaaacaaaaaaagggaggattcaattatgaaaaaagctgtcattgtagaaaacaaaggttgtgcaacatgctcgatcggagccgcttgtctagtggacggtcctatccctgattttgaaattgccggtgcaacaggtctattcggtctatgggggtaaggatctcccaaaagggcatagtcattctactatgccctttttaagtaaattacaatttttaactaaaatctacctcttggatatacatacacaaccgtttttcatttgaatcatatgtataggggatggtattttgtttatagagcagatgtttccatttattaatgaaagtgtaagggttcaccagcttcctgagggtggcgtgttagaaatcgactacttgcgcgataatgtctccatttctgactttgagtatttggatctcaacaaaacggcttacgagctttgcatgcgcatggatggccaaaaaacagctgagcagattttagctgagcaatgtgcagtgtatgatgaatcaccggaagaccataaagattggtattacgacatgctcaacatgctccagaacaagcaggttattcagcttggaaaccgggccagccgccatacaatcaccacgagcggaagcaatgaatttccgatgcccctgcacgccacctttgaactgacgcaccgctgtaatttgaaatgcgcccactgttatttggaaagctcacctgaagcgctcggcaccgtgtcgattgagcaattcaaaaaaacggctgatatgctgtttgataacggtgtattgacatgcgaaatcacaggcggagaaatttttgtccatccaaacgccaatgagattcttgactatgtgtgtaaaaagttcaaaaaagtcgctgtcttaacaaacggaacactcatgcgaaaagagagtttggagcttttgaaggcttacaagcaaaaaatcatcgtcggcatttctcttgatagtgtcaattccgaggtccatgactcctttagagggagaaaaggctcttttgcccaaacttgtaaaacgataaaattgttgagtgaccacggtatatttgtcagagtcgccatgtctgtcttcgaaaaaaacatgtgggaaatccacgatatggcccaaaaggttcgggatctcggggcgaaggcgttctcttacaattgggttgacgatttcggaagaggcagggatattgtccatccaacgaaagacgccgagcagcaccgcaagtttatggaatacgagcaaaatgtgattgatgagtttaaagatctgattccgattattccttatgagagaaaacgcgcggcaaattgcggcgctggctggaagtccattgtgatcagcccgttcggcgaagtacgtccttgcgccctctttccaaaggaattttcattgggaaatatttttcatgattcctatgaaagcatctttaactcccctctcgtccataaactgtggcaagcgcaggcgccgcgcttcagtgaacattgcatgaaagacaaatgcccgttcagcggctattgcggaggctgttacttaaaagggctgaactctaacaaatatcaccgaaaaaacatttgctcttgggcgaaaaatgaacaattagaagacgtggtccagcttatttaggagggaaacgatttgtcaccagcacaaagaagaattttactgtatatcctttcatttatctttgtcatcggcgcagtcgtctattttgtcaaaagcgattatctgtttacgctgattttcattgccattgccattctgttcgggatgcgcgcgcggaaggctgactcgcgatgagcattttggatatacacgatgtatccgtttggtatgaacgggacaacgtcatcttagaacaagtagatttacatttagaaaaaggcgccgtttacgggttgcttggggtaaacggcgccggaaaaacgacactgattaatacgctgacaggcgtgaaccgcaatttcagcgggcgctttacactgtgcggaattgaagcggaggccggcatgccgcagaaaacatcagatcagctgaagactcaccgttacttcgccgccgattatccgctgctatttacagaaattacggcgaaggactatgtgtctttcgtccattcgctttatcaaaaggatttttcagagcagcagtttgccagtttggccgaggcctttcatttttcgaaatacatcaacaggagaatttcggagctgtccttggggaacaggcaaaaggttgtattgatgacaggcttattgctgcgcgctcccctatttattttggatgagccgctcgtcggtttggatgtggaatcgatagaggtcttttatcagaaaatgcgcgagtactgtgaagcaggcgggaccattttgttttcttctcatctgctcgatgtcgtgcaaagattttgtgattacgcggctattcttgacaacaaacagatccaaaaggtcattccgattggagaggagaccgatctgcggcgggaatttttcgaggtgatcggccatgaataacataatccccatcatgtctttgctgttcaaacagctttacagccggcaagggaaaaaggacgccatccgcattgccgcaggccttgtcattctggccgtgtttgaaatcgggctgattcgccaggccggcattgatgaatcggtgttgcgcaaaacgtatatcatactcgcgcttctcttaatgaacgcatatatggtgtttctttctgtgacatctcaatggaaggaatcttatatgaaactgagctgcctgctgccgatttcttcacggagcttttggctcgcccagagtgtcgttttgtttgtcgatacctgtttgagaagaactttattcttttttattttaccgctgttcttatttggaaacggaacgctgtcaggggcgcaaacattgttttggctcggcaggttttcgttttttaccgtttactccattattttcggagttgtgctaagcaaccacttcgtcaaaaagaagaacttgatgtttctgctgcatgcggcgatattcgcctgtgtatgtatcagcgccgctttgatgccggccgccacgcttccgctttgcgcggtgcatatgctgtgggcggtgatcattgactttcctgtctttctgcaggcgcctccgcagcagagcaagatgcattcatttatgcggcgatctgaattttcgttttacaaaagagaatggaaccgatttatctcttctaaagcgatgctgttaaattacgcggtaatggcggcgttcagcggcttcttttcgttccagatgatgaataccggcatcttcaatcagcaagtggtttatatcgtgatttccgcgcttttgctcatctgctcgccgatcgcccttttgtattcgattgaaaaaaatgaccggatgctgcttatcacgcttccgatcaagcggaaaacgatgttttgggcgaaatatcgcttttattcaggcctattggcaggcggatttctccttgtcgtgatgattgtgggtttcatcagcggccgtccgatttcagttctcacttttttgcagtgcattgagttgctgctggcgggagcttttatcaggttaactgcggatgaaaaaaggccctccttcagctggcagacggagcagcagctatggagcggtttctcaaaatatcggtcttatctgttttgtcttcccctattcttagccacattagccggcaccgctgtatccttggcggtcattccgatagccggtctggtcatagtctattacctgcaaaaacaggatggtggtttctttgatacaagcaaaagagaacggcttggaagttaacctgctgaagactcatcaattttcaactatttcaatcgccgcgagctttctgaaaccgatcgaaagcgcggcggaacctgaggaagaaacgatttatttttacggcgccgccgcatacctgaaggagcaaattattgacgctttcggttgtgctgccggcagccgtttcatgtactcagcgaatctcttttttgatcagcagctgaaaacctgcgggacccgtttgattcacccattatataacgggaatcttcatgttgacgccctgctgaaaacttttgcagacttgtctttcccttcttctctttcattcgaagcagttgaaaaggccaggaatgagctgctgctgagaatcgaaaagaaattcactgatcctttctcctactcggcggcgcgcttggctgaggaggtcttcggaaacccgatgtacggcacaggcatgtttggccggaaagacaggataaaggcgattcatcctaaacggtttctcgacgcaacggactttatcgttgatttagtgtcccagcaaaaacagctgaacatattgggacaagtacaagcatgtgatgttcggggacatgccccgcaaacgtccgctgtaacgtccgaaagaatacccgtaaaccggcatgtttttgaaacagagacacgcagcgctgcaggtccttccgtcttgacactcggatttgactgcggagagatgaaagatgccagcgattatatcaaaatacagctaatagacggattactgggaaagtacggccattccgctttattcaagcacttcagagagaaggatctggcagtctatcacgttatcacccgttacgatgtcatgaacaatttgctgcttgtttcaatatgtacagatcagcttcatgagatagacattcccccgcgcgttttggaagctgtctcagcttttcatacagatgagcgggaactagaacaggcaaagcagtttttacgcaatgaattgctgctgcaattcgattctcccgaaggtctattggcctatatggggatcctgcgccgcttctcctgcacgaaagaagccttgctggatggcatctcagcggttacatgccgtgatgtattgcaattcatagcgaccatcaattatatcggagctcatgtagtaaggggatgaagagatggaaaagaaagccttttttcaacaactggatgaacgaaccgatatcagatacacagacagcggactaaaaatattcagattgaaattcccccgcgcccacctgcggctgtgcaatgtaaaaatcgattttggaagccgggatgtatgtatacgggcagaatccggtgatacactgcttccgtatggcacagcgcattttttagagcatcttctcttctggcataacggccgcaatctgtacagtgatttttttgcgcatggcgcgcttttaaacgcattcactacctacaccgataccaatttcatgtttacctcattaccggatcggctcagacaaacgatccccatcctgcttgatgctttatggaaccactcatttgacaagaagattgtcgctcaggaaaaagctgtgattacaagcgaaattcaaacagcacaccttaaccatcagctctcatatcattatcagctgatcagcatgctttctccctcctcaccagctgccgttttccccgcaggcagaatcgaagatattgaggcgctggacatcagtgatttacaaaaagcctataaggctgcctaccaagcccatcggatgacgctgtttttgattgggggctcagaaaatacagaaacgcttttgcctcctcacctccagctggaaaaacgtccggattatcatgctgaaagaaaaatcatcccggcatgccctccagccctctcacaaaaaatggtgctgggtgatgaggagcggatggaagatacatggaccggattacagatcggcgcacttcccgggcaaaacgatctgttggcgataaagctttattgggatatcgcggctcgtattctatttcaattagattcaccgttttttcaagagattcagcaaacgtaccgtctggaaatcgatcgcttgtcagccgagacttatatatatgaggatggcggtttcttgatccttcacagtcaagggacccattcttcagcttatatcgatgtggcttcatactatgtcacacagaagaaagaacaggttgccgcctggcttcaatacggcaaggactctttgacagacgcgatcatttatgacagcgattatgtgcgtaaatgcttcgagtgggcagccgagtgtgacaggtgcgattgctcgtttcttgacatgtaccacatcattcaagatatggatgcgcaggttttcttgtctctcattgatgcaatggcatcttctaacaaagcgatcattcacgtttctcagaaagaggcgatcagacaatgaaaaaaagcactgtctttacccttttattgctgcttataggtatggcggcttattccttcggatgggttcaggccgttgccgaagccgccgcccaatatgtacagatgatcaacaatgatgctgttcggctcggactgctggcttgtaccgctgccctcctgatgctgcctgcttttctatatcttcattatgtcacccaatccgtgaaaaacatgacagcagcttttcagaaactcacacagtctcatcaaagctgctgtgactttcagcaacacaacttgtgcagccgatatgcagaagacgtcaaatcgctgcgtgacagctataaaaacgtccgccaaacatacgtgatggctgccgtgttgtgccaagtcatcatattcggctgcatgttcgaaatcgttaaagccgtccctttccgccttcacacgccccctgccctttcaatgggacttgcgatgctactgattctgtatttattgttttgcatgcgaacttatttgcggcagcttttccggcacggcagcctgttcagaaaagtgtttgcgggagcgctggcagcagccgggatttggtggatactcagtttctctataagtgaactgctgtttctgattatcctggctaccattcagcaaatcggatcatttatttataaacgattctcttatcgcagcaccgcttctcttgatctataaaatagctacatcgcaatcgcagacggacccgcgccaaccggaatcaccgtcacggctgtataatcacttgtgcggtacacggtcacagcattgtcgttgggctgtgccgcataaatatactgtttgtccggcgttacggcgaggtcaaaagcgccggggagagacacgtttgcaatgatcctctgtctggccgtattaactacatataagttattaataagaaacggttcactatatggctctagaaaataagctctagtgctatcgagagaaaatacaatcgtcctcagcgtttcaaataaacggctgaagtcccctcccctgcttaatggagacaaactaatctccgttacacctttcggccacagctcaccattcaacacgtacgcaaaatttccagcgtaaggagttgcaattaaactgggaaattcaaatgtatctatgatactttctaccaactgcccagtatttatatcatatttatcaaccgaccaactgcttccattagcggtatagacatactgtccattcggatcaagagcaaagtctaaagcgccgggtatcggaatgacatcaatgaccgattgagaggccgtgttaatcacatatatagatccggcggccatcacgtatgcgaactcatcttttggatcaaattcgatctttctcggccctcctccaacagtaatggtatttatgatggttaatgttttattatcaatcactgagacaaggttggtatttccatggaggacatacgtgaatgctttatcgaaagtaacgcctagattagttggcacgtcagaaaaagggattgtttttacaacagtgtttaaatctgcatcaataaccgaaaccgtgctgtctccagtattggcagtaaacacatacgattgagggtctggtgatggcggtaaaacaagtgtcccggtcaccgtaagcggactgccgtagaaaggcggtacaatgagcagatcttccactgttatttgactgaaatcaggacagcggccagactgtgctgcataataaacaacttgatcaatctcttcggtatgaatcacagaaaccgccccattgccttgtccatattgatttcgcacaggcgacacactgacaagaagcgtaatggtcccttgtactctcacagcatatcgaacaccgatatcttctggttccggcccagtctggattaagcaaggctcactgatacaggacacattgtctgtactccatgtaacagccgctgacgcttcggccgaatcaaccttgaagccctcagggatatctatcggcacttgaaacggcgcttctcggctaatttcctcatcacaaaaacagaaacaattttcctgtaaagcagaaagatcattctttttcatgatttcacgtccttttagaaatgcacaacatgcagcggttaaatcgtaatggcacccggtgaaaccccaagagatatcacagtttcctcagaataatcatctgtgttgtaaacaatgatgctctgctctataaaacgagttgcatacagaaaatcgccattcggggtaaacgcatagtctgttgctgattgcggaagatttccaattacacctgctccattcggactgacagaatataaattgccagtgaagctgtcatgtaaatacacctctgatccactcgtaaacattacatatagcccgtcaggctccagctcttgggtatccctgatcgtaaacgtatttaaatcaataaccgtcaaataattgaataagaattcttgttctaatacatacgcataccgctccgtagaatctgtttctatggatgatacgataagctctcgttcaatcgttcctaagacttcaccggtagataagtccactttttgcactaacccaaaattaagaacataggcgaacaacccattggggtcaattgcaatatcaaaaccttctacaggaatagacctctcaacagtcaacgtatcaattccaatcacataaatggcagtaccggtgaaaacataagcaaactcatgattagggataaatctaatcaatcgaggcggctgatccagcaatatagttgctgtcactgttaatgtgtcataatcgatgacagaaatcacattattgttgggatgtaagacaaacacagcgcttttatctggcgtaatttcaatacctgccggattgtacggaagagcaatcgttgtcacaacagaatgagtgtttgtatcaatcacagaaactgattgatcatttggattcgctgtaaacgcataaacgggttccggctccggtacaagcacaatcgtccccgtcaccgataaaggactgccgtaaaacggcggaacaacaacaaggttctcaatcgtgatgtcactgatatccgggcaatcatccggttcatcggaataatagacgacttgatcgatttctgcattgtgaatgacggaaacagccccgtccccttgtccatattgatttcgcacaggtgagacactgacgagtagcgtaacggttccctgcaggcgcactgcaaattgaacaccgatctcatcaggctctggccccgtttgaattaagcaacggtcactgacacaagaaaggctgtctgcattccacgtcacgtttgcaacagcttcagccggatcaacgacaaatccttcaggtaattcaatcggcgcttgaaacatggcttctcggcttgcttctccctcacaaaaacataagcactcttcttgttctgctcctgctttttctttaaaggaaagcttgttttttctcattccttcacttccttttcagacatacactgctcacgcagatataacagaatatggaagtgtaacgtgtttgcttgtacaaattgctgagggtaaacgcttctttttgaaaatatatctccaaacatgcggtgtaacgaaagaaaaaattgcggtttttttgcgcttctcacaagaatgttgatgataaaatatgacatatatagaattatgaagggagggatttgcaaacgtgacaggtgtcatatcttcttcttccatcggagaaaagattaacgaatggtatatgtacatacgccgatttagcatacccgatgcagaatatttgcgacgagaaatcaagcaagagctggatcaaatggaagaagatcaagaccttcatttgtactattcactgatggagtttcggcacaacctgatgcttgagtaccttgaaccgttagaaaaaatgagaattgaggaacagccgagactgtctgatctgctgcttgagattgataaaaaacaggctcgtttaactggtctgcttgagtactattttaatttcttcagaggcatgtatgagctggatcgccgtgaatatgtattagccattcaattctttaaaaaagctgagagcaagctggtttttgtgaaagataaaatcgataaagctgaattctttttcaaaatgtcagaagtctattattatatgaaacaaacttatgtctccatggactatgcacgtcaagcattcgaaatatacagtgaacagactacatatgatatcagaatgattcaatgccagtccttattcggagccaactttttggatttaaaacaatacgaaaaagcaattgcccattttcaaaaagcctttacacttgcaaaaacagagcagaagccccaattaatgggaagaacactttataacatagcactctgcaagcaaaaccaaaacagttttgaatcagcgatagagtatgtaaaaaaatctattcaagtatttgaaggatctaaaatgctcccttcactgccacaagcttttttcctaattacacaaatttattttaaattaggtaagattgataacgcctgtgaatatcataaaaaaggaaaagagtattctgcagctgcgggagataccgtgtatctaacggagtttgaatttttggaatctttatacttgtctggaccggatgaggaacggatagaaaaatgttttgtttttcttgaaagtaaaatgatgtatgcagatattgaggacttcgcacttgatgttgctaaatattatcatcaacaggaaaattacaaaaaagcatctcattactttttaaaggttgaagaagcaagacagcacattcaagggggggtgaatttatatgaaatggaagtataaattattactcgcttgtttagctgtgagtgctgtatttatcacagtcgaagtatcaaattcatcaacagaacattttgatgttgcgcaacgcgccatgatctaaaccgccgtccatcggcggtttttttgtcccctctttacccaatctcccaattcatgctgtgatttttttcaataatcttgaagagagtggaaatgcagcatgtctctgtaaagtgtgagaacccactttacacagtggaatcgagaaaatgatgtgacggagttcgaaacgtcgagcgcgacagtgttgaacagacagctgagacgatcggcgtaagcccgactagaatcgccaagaccctgtccttcagaggggaaggagatcaggcgattctgattgtggcagccggcgatgccaagattaataacaaaaagttcaggcaaacatttggctttaaagcaagaatgctctctcctaatgaggtactggagcagacaggccatgaaattggaggtgtttgcccatttgggttggctcatgatcttgaggtttatctagatgtatcgctgaaacggttttagactgttttcctcgcatgcggcagcagaaactccgctattgaggagaattatccgaattttctttctcaaaagcatggattgatgtttgtaaagactaggaataaaaaacatccagacatcgtctggatgtttacttatttcacaaacccaagcagcatttcacggatgattttgctggctgtgtttgccgtttgctctgagtggtcatacaccggtgcgacttccactaaatcagcgccctttacgtttacctctgaacgcgcaatttcatggaccgatgcaagcagttctttagacgtgatgccgccggcgtcaaccgttcctgtacccggtgcgtgtgcagggtctaatacgtcaatgtcaattgtgacataaaccggacggcccgccagcttcggaagcacctctttcagcggttcaagcacctcaaattttgagatgtgcatgccgttttccttcgcccattcaaactcttctttcatgccggaacggattccgaatgaatacacattgtgcggtccgatcaattctgccgccttacggatcggcgtggagtgagaaagcggttctccctcataatcaacacgaagatctgtatgtgcgtcaaaatggataatcgcaaggtctgggtatttcttgtacatcgctttaatgacaggccatgacacgaggtgctccccgcccatacccattgggaacttccctttttctaaaatgctgtccacgtactcttcaatcatatccaggcttcgctgcggatttccgaacggcagcggaatgtcgccggcgtcaaagaagttcaagtcagccagatcgcggtctaaatatgggctgtattcctcaaggccgattgacacctcacggattctgcttggaccaaagcgtgagcccgggcgatagctgactgtccagtccatcggcatgccgtaaagaatggcatccgcctcttcccactcgggacggctcgcgataaatacttttcctgaataagcttcatcaaatctcatcgataataccctcgctttcctgtaaaaaagcgcaagattcgctcctgcgccataccttcattatttaatcaggtcactcacaaatttcggcagaacaaatgccgctttatgaatatcttttgtgtaatatttcgtctcaatatcgaagaaacggctgtcttccactgcaagcggatcatattttttcgagccaattgtaaatgtccacaaaccgctcggatatgtcggaatgttcgccgtatacagcttcgtaatcgggaagatttccttcacgtcgcgctgtacatttgtgattaattccggtgtaaaccatgggttgtccgtctgtgcgacaaaaatgccgtcttctttcagcgctttagcgattcctgcgtagaatccttttgtaaacaggtttacagccggtccgactggttcagtcgaatctaccatgattacgtcatattgattttcagattttgcaatgtgcataaatccgtcatctacctgcacgtcaacgcgcggatcatccagtttgcctgcgatagaaggaaggaactttttagagtattcgatcaccttgccgtcaatatctacaagtgtcgcttttttcacgcttgggtgcttcaggatttctctgataacgccgccgtcaccaccgccgactacgagaacgtgctccggatttgggtgcgtgaataatgggacatgcgccaccatttcgtgataaacgaattcgtctttttcagatgtcatcaccatgccgtctaaaaacagcatgttgccgaactcttctgtttccaccatttctaaatgctgaaactccgtttgttctgtatgtaacgttttgttaaccttcatcgtaatgccaaagtttttcgtctgcttctctgtgtaccaaagttcgctcaattgtcatctccctttcgaggctgtattcatttattgtaagcgtcttatcagcttttattctcggttgaaatctcattttcacctaaggaaaaagtatagaggatgccggggaaaaagtaaagatgcgtcctgttctgcgatgtttaaaaacgatctttttttctcataatagtagaaacataaaaaaaggggggaacccgttgtggatgcaatgacaaataaacggctgagactgacgctgaaaaccgttcgcgcctttatctttttaggggcttttgcggccttggcggcagctgccgtgtttatgactgtcattttgatagccaaataccagggcgctccctcggtgcaagtgccgcaatccacgattttgtatgcgagtgacggctcaaagctcggggaaacgaactacggcgaaaagcgctattgggtccccttaaaggacatgaatccgacgatcgtaaaagcgacagtggcgattgaagaccagaatttctacgatcatcacggctttgattataaacgcatggccggcgcggcgcttgctgacctgaaagcatttgccaaggttcagggtgcaagcaccatcacccagcaatatgcgagaaacttataccttgaacacgacaaaacgtggaaacggaaatggaatgaggcgttctacacgatccgtctggaacaaaactattctaaggacgagatattagaaggctatttaaatacgatttactacggacacggcgcctacggcattgaagcagcttcccgcctatatttcggcaagcatgccaaaaacctaaccgatgcggaggcggcgcttttggcaggtatcccgaaaggcccttccggctattcaccgtatgtcaatgagacgaaggccaaggaacgccagaaaacgattgtgcggatgatggaaaagcagcagatgatcagccaaaagaaagcggatgaattgatcaaggaacctctttcctatcagcctttgaataagcaagtttccaagagaaaggctccttatttctacgacaatgcgatgagagagctggagaaaaagctcggcatgacacgggagcaaattgaaacgagcgggttaaacgtctatacaacggtagataaacggatgcagcgcatcgccgaggagaccattaccgaaacggttaacgcgggctctgacattcaagtcgggttttcagccattgatccccgcaccggaaacgttctcgcccttgtcggcggcaggaattatcaaaaaagcccgtttgaccggacgacacaggcgaagcgccagcctgcttcgacgatcaagccgttgctgtactataaagcgattcagagtggatttacgccagtcactttaatgaaaagcgaagaaaccgagtttcaaattgatgcaaagggagaaacctattctccaagcaactataacggatactacgccaacaagccgattacgcttctgcaggcgctggcgctttccgacaatatttacgctgtgaaaacgcatctttttctcggcacgaacaaacttgtaaagacggcaaaggaattcggcattaccgcccatcttcaagcactgccgtctctggcactcggcaccgaacccgtgcgtccgattgagatggtcaacgcctatgccatgctcgcaaatggcggaaagaaaatcgaaccgacttttatttcaagggtaacggacgcagccggccacgtgctgtacgaaaacccgaatcagcataaacaggtgcttgatgaaaaagccgcttttgtcacagcgagtatgatgacaggcatgtttgataccgatttaaatggatatacgtcggttacgggacgaacgatagccaaccgcctgacaagaacgtatgccggaaaatcaggaaccaccagcgcagacagctggatgatcggcttcaatccgaagctggccgcaggtgtttggaccggctatgacaaaaacagcaccatcgactcggtcgaagaaaaaagctatgctaaaaccatttgggcggacttcatggaggacgcgctcaaaggcgaaccggaaaccgcgttcaagccgccaaaaggcgtaaccggtgtgtacattgatccggaaacaggctactcatcaggtcccggctgtgccgctaagcattacacatattttgtgaaagggacagaacccgcaaacgtgtgctacggggcagaacccgcaaaacaaacaaaagaccggcttccatccaaagaaaagcccgcttccgagaaaaagtggtgggacaaatggctggggcgacatcattgaaaataacccggctcctcggaggccgggttattcgtatggttccttcataatcgatggaagaatgttagacaatcgagctgaacaatcagttttgggataaagtggtgaatttctcatttcttcggcgctggctttcatctcccagtcgccgactcatatccccctaaaaatgaaaaaccccgagtcttgtttcggctcgggattttccatgtcctatttctgtatcaccagtttactcaatgtttacgaaaaatatctcaaatactttaaaagttcacagaaaattcataaattaattgttttccggaagcaggcttgtttttaattcatctgatgaacggtcccataggccctgatcatgctttttcagaaattcgcctagtacacgcttcgagctgtcgtccattttatcaacgatgattttccgtttcatggatttatccatcaaattcacatgctcaggcagcgacttgtagcctcttctgatgcttctgtcgaccgtcatttcacaggctgtcacaccagcgtaataaggcccctcttcttttctgtcaatcgttacccacacaagccagtatggttttccgttcggcacttcttctttattcgggagaaatttaattcctttttcaacggtgctgcgggcatgcatggcgccgatgtctacgaacgcttctttttcttctacatcaacgaatacgggagaaatgttatcaaggctgagtgcccctacgccaaaaccgccgtgtccgtctgtcggatcacttttgataatattaaacccgattgattttttctttttttcttccatgaagttctacctcctacaaaagcggttgaaatatcgctgaaaacagctttaaaatcgaatctcttcctgcattgagcatcggccacagcacgtaagatcctagcggtgtcacaaacagcaccaaaaatacgataaagccgtagctctccgcctgcgtcattttggtacgcatgcccggcggaacgagatcttctataattcgatagccatcgagcggaggaagcggcagcagattaaataaaaacaagacaagattcagctgtatccaaatggaaaaaaactgatccagccccgtgctgaacgccgcaagcatttccattccgtacgcatgcatcaacactaacaaaaagaaaccgataaacgcaagaatcaggttactgacgggcccggctatagatacgagcacaccggcaagccggggtttcttaaagaagcggcgattcacgggaatggggcgcgcccacccgaagccggccaccaaaatcaaaatggttccgaacggatcaaggtgtttaatgggattcagcgtcagtcttccttgttttttcgccgtatcgtcaccgaatttgtatgcgacataagcgtgggcaagctcgtgcatcgtaaacgacacaattagcgtgatgacgaggtatggcattaaagataacggataatataaaaaacggtccaagtgagatatccctctttctcaaaatgcaagaatttactttattcagtatactataagaagcctctttttctaaagagaggaaacgagataaaggaggattcagcacccatgccatacgtaactgtcaaaatgctcgaaggccgtacagacgagcaaaaacgcaatcttgtcgagaaagtaacagaagccgtaaaggaaacaaccggtgcttctgaagaaaaaattgttgtctttatagaagaaatgagaaaagaccattatgccgtcgcaggcaaacgcctgagcgatatggaataatctctataaagccggcgcttcgcgcaccggcttttattatccctattgagccagcttcgcaataatcgccaagaacgtctttttctcttcggctgttaaacgttcaaacatgccatcaatcagctgctggcggttttcgatcatttgttcagccgctccccggcccgcttcagaaagcgtaatccatacagtgcggcggtcattgttatttctcgatctctcaataaacccttcctgctctaaatgattcagagctgtggtcgtggcagagggagacagtgtgacctccttcaaaatatcctttatggtgcagctcccatgtctgtatatgatccgcagaataaatcctcttacattattcacgtgtttcggaacggtggcttcatctaattgcttcgtgcttttcaaatattttgtaagtgcgtgatccagcaaatttgcttccagtttgtcatggtccatgtcaatttccccatttcgagatgcattcataacatacgaacgatatgatttacttattattttactgattccgaatagggaaagtcaaaaaagcaaaatgtgaattcacagcttttatcctacatgcctcgattttccacctgtttgacaagcttatctttaaatgtctgaaaaggaacatgttcattctgctgatgtccgaatcggcggacgtttaccgcattctcctgctcctcatgatctccaagcaccagcacgtacgggattttctgcacctgcgattctctgattttatagccgagcttctcattgcgctcatcaatgccggctcttatccctgcctgcttcagctccgcctgcacctttctgcaatagtctaagtgaacgtgcgaaaccggtatgatttgaacctggagcggtgcgagccagactgggaaagccccgccgtaatgctcgatcaaaataccgaagaaacggtcgatcgagccgaaaaccgctctgtggatgacaacgggacgaaccttttcattgtgttcgttgatatatgttaaatcaaatttttccggcatttgaaaatcaagctgaattgtcgcacattggtggctccgtttcagggcatcttttatgtggaaatcaattttcggcccgtaaaacgccccatcaccttcattgatctcataagagaggccaagctcctcaaggacgcgtgctaaggcacgttccgacgcttcccaaaggctgtcatcgcctaatgaatcctccgggcgagtcgaaagctcaactgaatactcgaaaccaaatgtccgatatacctcatcaatcagccgaatcgcttctttgatctcactctcaatctgatcctcccgaacgaaaatatgggcgtcatcctgacagaacgtccgaacgcgaagcattccgtttaaagcgccgctgtattcatggcgatgcacctgtccgaattccgccatgcgaatcggcagatcccgataagaatacaggctgtttttaaagatgagcatgtggccggggcaattcatcggcttcattgcgaatcttgtatcatccacttctgaaaagtacatattgtcgcgataatggtcccaatggcctgactgctcccataaccgctgattcatcataaacggcgtacgcacctcatcgtagccggcatttgtttgcagctcacgcgagaagcgctccagctcattgcggacaatctgccctttcggcaaataaaacggcatccccggcgcttcttcagaaaacataaacagccctaactgtttgccgagcttgcgatggtctcgttttgccgcttcttccagcatatgcaggtgcgcatccaaatcttttttcttttgaaacgcaaccccgtacacccgctgcaggacttcatttttactgtctccgcgccaataagcgcctgatactcttgtcagtttgaacgccttgatcatccctgtagaaggaagatgcggcccgcggcacaggtcaacgaattccccttgctggtacagtgtgatatcctccccgcgcggaatatcctttaaaatctcaagcttgagccgctcgtctttttgtgcaaacagctcttcagcttcttcgtaagaaacctctatacgtttgatttcaaggttctcatttattatgtttttcatttctttttcgatggcccctaagtctcctgatgccaagcttttccccagcttcatgtcatagtagaagccgtctagaatcacaggccctacccccaatgacacttcgccgtacagccgttttactgcttgggccagcacgtgcgctgttgtgtggcgaagcacctgcaagccttcttgtgaatcgagtgtgacaatcgaaagctcagcatcctcctccagcttgaaactgagatcaacaagcttgccgttgacctgacctgcggccgccttcttttgcagactggaactgatagaaccagccgcttctttgattgtgatgcctttcggatattcctggatctgtccgtccggaagctgaatgtgtacatttttactcattttaaaacactccttattcattgttgtatataaaaaaacacacccgtcccgcagatagggacgagtgtgtgattaacccgtggttccacccaagttcccgacaaatactatattgtcggctcggtgctgtaacgcagcatagacggcattggatacttcagttccccaatgctgctccaaggcggtaaatgatattcctaagctgggaagctctcacctttccttccctctctgaaaaccgtaactatcattcgtgtccttttcaacgcatttatgtagttcatataaaaaaacacacccatccctctaaaagggacgaatgtgttgatcatccgtggttccacccaaattcccgatcaattacacatggtgatcggcttaaagatgctgtaacgcagcatgacggtatcagatacttgttttccccgatacggctcaaaggcggtaagctgctttccctgcgttaggaagatctcagctgtccttccctctctggaaaccgtaaaaagcatctcgtgtccttatcagtgcctgttgtttcaataattttttacatcttactatatattcccacaaagtgcaatcagtgatttacattttttctgacgcggcagtcccgttatgggcagccagaaacagccatacaagcaatgcagcgaggctgtatgcagcccccatcatcaaaaatgtaaacccggcaccggcataccaagtggcggacagatgaatgatcaccccggttatcgctacgccgaccaaggctccgatttgccggtttgcatttaacgccgcaccggcgatattcgcatgtctttgcccggcagcctgcatgatcacagttgtcatggcaggaactgtaataccggtacagaggttcataacagacatcaacaccgccagctgccaataaggaaaatccggagaaatcagcacaaacaacagcaatgcaatgatacagctgaccgccattgatacaaacataagctgcccggcttcaaatcgattcgccagacgggcaaacagcagattgccgaacacgaagaccgccatcatcggcagcagctccactccagccataaaggaacttgcccctcctgcttcctgcaaaaaaaggctgagcataaacatgccgccaaaaagggcgaaattcagcaaaaacccgataaattgggcagctgagaagcggccgtttttgtataaggacgccggcaggatgggtgcttttgcagaaatttcccgcagcaaaaacagcacaaatgccaaaatcgctgcagtaaatactacaagaatcactggcgagcgccagcccgctgaaggcccctgtatcaaagcataggaaagaaacccgagagccatcatgccaagcagatgcccgatgatgttcacgcggctgctttttcccggaacgcggctgaggattcggtaagctgaaatgagcgcagcagcccctattggcacattgatcagaaaaatactctgccagcccgccaactctaccagcacgcccccgataaaaggcccaagggctgaagcggcagaaacaagcgcggcccacagcccaaacattctcgcccgcgcccgctcatcagggtaagaggcagccaaaaggctgagtgagcttggcataaacaaagctgcgccaattccctgtataaggcgtccggcaatcagcatctgtccatttatagatgcagcgcataaacaggaggccagaacaaaaacggctagacccaagatatagatcgtcttcgagccgaaacggtcagccaaggctccgcccgccagcagaagcgacgcaaaagtaagaatgtacccgtccacaacccacgttacacctgaaagtgacattgaaagagtgtttttcatatcagccatcgccacattcacaacggtcacatcaagagttgccatgaggaaaccaagtgcgagcacgatcagcacggatatgcctgttgatgatgttgattcttgtatagacccactatttttcattacaattgccctttcacttgcttgattacccaatcatctattttttcaagatcatacaattccccgactctgtccatgacatgctgcaaggattcttctctcataagattggaccatttatcctcgatttcccccatgactgtctccagcacacagtgactttcaccctcaaatacagattgcagcaggcctttcccctgatacatcgaacctctgccttcgaccgcttgataaacatcataaagcgtaatgtcagccaaaggcttcgtcagggtaaaaccgcccttcgtccctggcaaggattctgccaaaccggcttgaactaatgttctcatcagcttcttcaagtaagacggagacacgcgcaatcgctggcttatagcctctgacgtcaaagaagcctgtacaggcagccttgacagtaacagcagcacagaaaccgcctgctccattcctgatttcattttcatcctattcactcccgattcattatggataactattatccataatgaatctcttagcagcttttgtcaataaaaaaagcaaaagaaacgattcatttcttttgcttagtatggttaacaaatctgcttcagttcctctatgtattgaagcgcttcgtcatattcttcatttgtatatttttgcttgcttttgatggtaaagactttttctttcttttcctcatcctcaagcccgtcaaagtaaaggatcgtggaaaccagctctaaaaaccgtgatgaacggctgtttacactgtcgatatagcctttcatatccggcatgtccagatcagcatggtctaaaaatgcggagcctgtctcagtcagcgaataccggtattgaaagtagccgccctttttttccttcacctcatgcagaaatccaaggttgcacagctcttcaatctggagcgtcagttcctccgaatacggtccataaaagtgaaaatcatatttctcatagaaaggaaactgcattttcttggcgatataaatcattttctgcagcttctttcgcccgatgatttctccagaatccgagaacaccttcatcagttttgcatgttctttcaacaaattcccgacatctcctttttccttctttccaatttctatgtcagtcccagcagctgccggattttcattttcgcttccggatgttcagagccgtcacaaatcaagtcctttggatagtacagcttgtggtccgtccgccgtttacctgagatggattccacaatagccgactgcctggacagctctttaatttggccgttttgcgtcaagagatggatcggcagacgctcctcttcctctcccggtcggtaaaaatcgtatggcagatctgatgaagaatcaacgaccaaataatagctcggatcgattcccgcctctttgaacaatgaagtcagctcaaaataagccgacatttcttcattcggattgaattcaacgtattggaacagctggcggttaatgaatctgcggcacaagtcggataaaatcgcgtcttcttcatcctcccaggcctggaagtaatacaaaataatagattcatccagctttacataatcctccagtgtcaatttcccttcaaaaatagaatagaaatgaaccggagcgtgagtgaagacatagccttcatcgtgcagctgcttcgccctgtgaagaatcttcgttaaaatgacctctgcacttctggtcacaggatggaagtagacctgccagtacatttggtaacggctcatgatatagtcttcgacagcgtgcattccgctttctttaatgacgatctgatcctcgcgcggccgcatcacccgaagaatccgctccatatcaaaatggccgtagctgacgcccgtataatatgcgtcgcgctgcaggtaatccatgcggtctgcgtcaatctgactcgaaatcaggctgaccacttgcttgtttttatatgttttggcaatgacttcagcaacatcctgagggaaacccgggctcacctttctgagcacctgattaacctccgtgtctcccaaaatgatacctcttgtaaaatcctcgtggtcaaggtgaaagaccttttcaaatgaatgcgagaacggcccgtgcccgaggtcatgaagcagcgccgcggccaaacagagttcgcgctcactgtcatcccattcagggcggcctttaaagacgtcatcaaccattcttctgacaatttcatagacaccgagagaatggttgaaccggctgtgctcagccccatggaacgtcaaataggtcgttccgagctgcttaattctgcggagacgctgaaattcacgggttccgatcaaatcccatatcagcttgtcccgaacatgaacatagcggtgcaccggatctttaaacactttttcttctgataattttccatttggatacgccatcgtcattccctcttttttttagccgtgtttctattatatcgactctattctttgaaaacatccttgaatttgcccggcgatttgttccatcttcatgaaaaacacatcttgtgaagcaaaaaagcctgacctgagggccgaggctaagaaaaaatatgtttttacttttttattttcttttttactttgtcaatcagctcatcctctgtcggagctgacagcgggcgattgttcacaaaagcaaatgattttttccgtccgggcccgcaataagattggcatcctacctcaacctttgcgtccgggtccacttctttcaaacgcggcagcaatgttttgatattagtggcttggcaatcatcacacactcgaaattcattagccatgacgtacgcttcccttcatttctatgttcatctatgtgaataacctaaaatcacgtttcaaaaaaaatcacatcactcttcattttacaaggattcgactgttcctgcaagccgctccatccttcgtatctcctattctttcagccaatttgtataaatattttccaacctggacattctaataccatgaaaagaaaaatgggagttgagataaatgacaaaacagcgacaagacgcttggtcagaggaaaacgatctgcttttagccgaaacagtgcttcggcatgtgagggagggcagcactcagctgaacgcctttgaagaagtcggcgataaattaaaccggacatccgcagcctgcggattcagatggaacgcagtggtccgccatcaatatgaaaaagcgcttcagcttgcgaagaaacaacgaaaacagcggatgagagcgctcggaaacgggcagcccgcgaaaaaaagattattatatcagcctcctgccgttgatcctgaaatcattcaagaaaccgctgcagaagagccggttaaaacggaaacaccttctgtcgaaaatgagcaacctttaatgtctggcgaacatatgccttttgttgatgaaagctttaaggaagagttagctagtctatcacacttattgtctcctcaaacgcctgcagctgcgcctgagatgacgatgaatgatgtgatccgcttcctgcagaattacaaaggcaataacgagcaatcatcagcattaaaaatggaaaacgagcgtttaaagaaagaaaatcaggaattgcaaaacaaaacagagcagctagaggcagaagttcaaaagcttgaaaaagaccaaaaaacgatccaagaagattatgaaaccttggtgaaaattatgaacagagccagaaagctagttttatttgaagaagatgaacatgcctctccgtccttcaaaatggaccggaacggcaatttagaaaaattagcggaatgacatagaaaaatcccaaaacgggcagctgttttgggattttcgccatgtgcaaaatccccttttctattgagaaaagagaatttcctcattttgcagccggatcagctattcttgtaaaatgaggccaagcttatgtgaatctattaagacatgtgagctgcctcggccgttttttgtttccgaggcgcagcagaaatgaccaaaagccccagcatcataagcgcaatgcccagccacgaggaaggcgaaagcatttcccctatgaaaaacacgccaagcaatgaagccgtcagcggttcagctaaagacagcgtgaccgccgccgaggccggaaccccggtaagccctttcgcaaacaaaaagtatgcggcacatgttgcaattaacccgatgtaaaggcttgttcccagtcctctaggggtcaatatccacgagatatctaactgccataatagcggcgtcagcaagatggcgctgatcatgaatacaacggcggaggtcgctcgcggaggctgggttttcatcatcgctttactgatgagcgtatagcctgcaaaagaagcacccgctccaagcgccataagaacaccagccacatcaatccgaacattggaactgtcggaaaacagaagccagcaacccgctaaagccagcacagtcgcaatccaccaagagtttcgcgggcgtttcttcaatacagcccattcgagggtcccggcaatgataggcgcactgccgatggcaatcacagttcccactgcaattcccgtttctttaaccgctgtgaaaaacagcggctggtaacacgccatacaaacagcggctaaaaatacgagcggccatgaccaatttttcacgtgaagctcccggctgatccaaaccgcaagcagcatggcgcttcctcctattaataacctgaacgctccaaatgccagcggtgtggcgctttctggagccaacgcctgaacggttcccgtagttccccagaaaaaagccgccatcaatacaaaaaggctgtaaatattccccttcatctgcctctcccctttaatatggatgctgatgtcattttatcgtttttctttttgtcgtggttatctgtatgtaagaaggatttatctgaaaataagattgtggggtaaaatgctgcttgaaataaaaaatgtatgccggcatatacagccggcatgcgaagaacgttcacccaaatacctttgcattccgctcagccatccggacgaggtttttctcaaattccatttcctcatcaatggacagtccagctgaataaagatgggtgcttaacgcttttaattccgtcaataaagcgaacattaagtcttgtacggagatgtctttttgcagaagctcacttaaggacgccatcgtttccggacgtatttccggatagacgccttttttatcgttttgcttgtctttcagcgccgcttgatagaatcgtctgatcaagtcggccctttcactgccgcttttatctgcacagagataaatttgaacagcgactccgccgcgaacgcgtctctgagagatgccggcgaactttttgccatttatactgaggtcatagctgccgggacaataagacccttcaatttcataggcttcgatctttgcgttgtacggtctcagcattcgtctcatcagctcgaccatcgcttcatatcctttgtctatatcgatgcctttcttttcgtcctcgaatatgagagagatatttaaaacaccgtcatccaatacgacggcaagaccgccggaattgcgtacgatcacacggtatccttcgctctccagcaaggagataccatcctgcaaaaacgggaggcgtgtatcctgtattccaaggacaattgtatcgtggtgcacccatgagcgcgctgtcgccggcgacacgccttttccgacggacatgcatagcgtatcatccattgcgaaggattgcttcgcatcaaataaagggccgagactggattggtcaatgactctccatttcggctgcatcagtaaatcaatcggttggtttgccatctatgtaaaaccctttcatgttaggcttattgaacgaaaactattatatcatttcagcagctgtgattgataattgcttttcagcatcgtaataaaaatttctttattttttgtattctccatgagaggagaatgaatgtaagacagcttgcgctttaacgagaaattattaatatgcagaattgaaatttcgcggtggatcaaatccttacgcagcacgcttctggatagaaccgaaagtcccatgccgttaatcaccgcttcctttacaccttgattgctgctgatggtaaacattgatttcggccgaagtccatttgaactgagtacatgatcgagatattctctcgtcccggagcctttctctcttgtcacccacgcttcgttctgcaaatcgctgatcgaaatctctttccgcccggcgagcggatgctgatttggagcggcaatgcacatttcatcctccatgaacggttcaatttccagctcattctcgtttgtatgtccttcaatcagcccgatatcagcctgaagcatacgcacacgctcgctgacctcctctgtattgccaatcatgacatcgaggttcagctctggatacagcttttgcagctgggccaatagcggcggaagaatatactcaccaattgtaaagcttgcagctattttcaattcgcccttcacatagtgatgatgcgcatagatttcagccttggcttgttcgtagagaaacaccatttgctttgctctttgatataaaatgtctcctgtcggcgttgtcgtaaagtgttttggcgacctgttcagaagagccgtttgaaattctttctcaagatttttgatatgcagactgacgctgggctgggagatcatcagcttttctgccgcttttgtgaagtttttttcttctaccaccgctataaacgttttcagcacgtcgtaatacaaaaaccccacccctgtcattaatgaaatatatggttatgattagttttctttattgtactcatatcatccgtcttggtaaagaaggctatacagaagcgcaaaaaaggcagccctcggtcgagagctgccatcgtcttcatttttattacagtgcttgcgccgctgtaattaatgcgagattgtaaacatcttcagcgttacatcctcttgaaaggtcgtttacaggcatatttaaaccttgcaggattggtcctacagcttcaaagttgcccaaacgctgagcgattttatagccgatgtttcctgcttcaaggcttgggaatacgaatacgttagcgtcccctttgatctcggaatccggcgcttttttctcagctacagatggaacaaatgcagcatcgaattggaattcgccgtcaagtgtcagttcaggcgctttttctttcgcgattttcactgcatccgctactttttctgtttcatcagattttgctgagccttttgtagagaagctgagcattgccacgcgaggctcaatgtcgaacatttttgccgtattggcactttcgatcgcaatctcggcaaggtcttggctgtcaggcgcaatgttgatcgcgcaatctgcgaatacgtattgctcttccccgcgagccatgatgaacacgcctgaagtctttttcacgccttcttttgttttgatgatttgaagagccgggcgtacagtgtcagctgtcgagtgagcagctccgcttacaagtccgtctgcaaggcctttatacaccagcattgtaccgaagtagttctcgtctaataacgctttgcgagcctgttcttctgtcgctttgcctttgcggcgttctacaaatgcttgtacaaggtcttccatgccttcatatgtatgaggatcataaatcttaacgccgtccagcgtaaggttcaattcttttgcttttgcttggatctcattttcattgccgatcacaatcggattcagcactttgtttcctgcaagcttgctgaccgcttctaaaatacgctcgtctaagccttcaggaaatacaattttaacgtcttttccagctactttttcttgcactgttgaaaataaatctgccacaataaaacctcctcaaaaagttacaaaaacgctttcttttactagcatactcttcttccaatcaaattcaaacagccaactttcattatagcgctttcataaaaaaatcttatttttctaactaatttaagtgactcaatcttcccttataggttcttctattttgatggagttatacggaagggatgttcaaggtttctccacagtagaatcggataaactatggtatagtgaaggcaatcatgaaaagataatgggagtgaagataaatgagtgaacagcaaatgacgaatgaagctgcaaaaacgcttgacggctggtatgcgcttcatgatttccgcacaatggattggacttcctggaagctgctgtccagtgatgagcgccaatctatcatacatgaattcaccgggttgcttgaaaaatggggcgtagcccaaaaagaaggaaaaggatcgcaaactctttacagcatcgtcggccaaaaagctgattttatgctgatgatccttcgtcctacaatggaagaattaaatcaaattgagcttgaattcaacaaatcaagacttgctgagttcaccattccggcatactcctacgtatcagtggtagagctgagcaactacttggcaagcggtgacggcgatccttatgaaaatccgcatgtgcgcgctcgcctttaccctgaactgccggaatcaaaatatgtatgcttctatccaatggataaaagaagatccggcaatgacaactggtatatgctttcaatggaagaacgcagaaacttgatgagaagccacggtttaatcggccgcagctatgcgggcaaagtcaaacagatcatcaccggctctgtcggctttgacgattacgagtggggcgttacattatttagcgatgatgtccttcaattcaagaagctagtgtacgaaatgcgttttgacgaagtcagcgctcgctatggcgaatttggttcattctttgtcggcaatcacctttcgcttgatacacttcctcaattcctatatgtataatatcccctcccgccctatccggcgggagtttttcaatcctcctttatcagaatttaaataaaatttgctattttcttcgttttttcttacgatgtagataataatccaattttttcaaaggggtgcagttatttgtcaaaacgaaccgcatttgttatgggagccagtcaagggatcgggaaagcaatcgctctgaaattagcagaccagcatttttccctcgtcattaattcgcgaaatttggataatattgaatctgtcaaagaagacattttggccaagcatcctgaggcgagcgtcattgtccttgcgggcgatatgtctgaccagcatacgagagcgggcatttttcaggaaatcgaatctcaatgcggacggcttgatgttctgattaataatatcccgggcggcgcgcctgatacatttgataactgcaatatagacgatatgacggccacgttcactcaaaagaccgttgcctatattgacgctatcaagcgtgcttcctcactgatgaaacaaaacgagtttggcagaatcatcaacattgtcggaaatctatggaaagaacccggcgccaacatgttcacaaacagtatgatgaatgccgctttaattaacgccagtaaaaatatttccatccagcttgctcctcacaacattactgtcaactgtctgaatcctggttttatcgctacagaccgttatcatcaatttgtggaaaatgtgatgaaaaagaacagcatatccaaacagaaagcagaggaacagattgcttccgggattccgatgaaacgggtcggatcagccgaagaaaccgcagcgctcgccgcgtttcttgcctctgaggaagcctcctacatcacgggacagcaaatttccgctgatggcggcagcatgaaaagcatataaaaacatcccgctttttagcgggatgtttcttgtaatgacccgaacggcaggttcagcttttgaatccgcgtgacaaattcccgcagatcctcctgcttcgacaccattgagattctgacatgcctttttccgttgcttccaaaaatttcgcccggtgtgactacgacatgggcatgctccagcaagtaatcggaaaattggtgagatgtctcaaacgtattcggaatttcagcccatacgtaaaaggttccttttggcttttccatcttccagcccaattccttttcgcaaagcgccgtaaaaaagtcaattcgttccttataaattcgtttcaacgattccgtatgctccggatctccagaaagcgccgcactcgctgcctgctgcagcccgccgaacatgccgacaaatacatgatcctgaaattcattgacggcctgaatgatcttttcgttcccaaccgcaaacgccattctccagccggccatgttaaatgtttttgaaaatgaataaagctctgctccgacaattttggcatcctctgcctcaagaaaactggccggtttttgatcgaattcaaacgctccgtatgcaaaatcatgaatcaaatggatgttatgctctttcgcaaaagcagcagctcttgcataaaaagccgcatcagccacagctccagtggggttgttcgggtagtttaaaaacataagcttcgctttttccagcacggctggatcaatcttttcaaaatccggcagatagccattttcttcatacagcggcatttcgtaaagctcagctcgcgccatcgtaatccctgataaatattcaggatagcctggattcgggactaaagcgatgtctcccggattgagcaggcattgtgtcagcacatacaatccggctttcccgcctccgaaaagcgcgacttccgtttcaggattgattgtcactccgtattcccttttatagaaagcagcgatcgcttcctttaaaaaaggatagcccctgaaagggccgtatccatgaaacgaaggattcagagaagcctcccgcaaagcctccacaatatgcggcggagtgggaaggtcagggttcccctgtccgagattaatgatatgggcccccgttttttccaattcctttaccttttgaaaaacgagagaaaactcctgccttggaagtgtcttgatgacatcggacggtgttatttccatctaaaagactcctttttgctccgttttgttatcccgttccaaaaacgatttgttgacgagcttcgtatgcagaaacaaaccgcatacgatcacgacaatcagccccataatgaccggagcgcttaggatgttaatgaacattgaaccaatagaaatgcataatccgatagacgcttcggccactgaaaaaatgcgcccttgaatctggtttgccgcattttcctgaaccttcacttttgcaagcacttccccgtattccatcgcgatgaaaaagaggatcgccgcgatgacagaaacagcgaaaatcggcgtgaataaaaacagcgccagtgagacaatggataaaacggtaaagtacgtcaggcctctattgttgttaaagccccatttgctgacaagcaccgctccgataaagccgccgaagccgatgcagaacgtgagaataaagttgccgatttccccgtcacccagaaagcggctgacaatcggaaaatagctgtacacaactccccacagcaaagccattgtaatcatcgtaaacatggcgtttaatacgaatgcattggttttgatttccttgagtccttccttaaaagactgaaaggcctctttaatgttttcagattgaatcggcacaaattgcagcttgatacggctgataaaaaatgccgaaaccaggtatgtcaaaccgttaaaggcaacagccagctctacagatccacctaacagaaagagccctccggcagccgccccgacgataatggagatggttgtcgcttttgcaaataacgtgttgatgcttttaatatctgattccaaggacgacatgacagcgagacgggcgggattaaaaaacacgccgcttccataagaaataaacagcagggccagaaaaatcagcggatactcgccttttggaagaaatgtgagccccaaaaagatgatgcctctgatgatatccgtccacagcatgatcttaattctgtctaaccggtcgaccagaacccccaaaaacggctgaaacaccatcggaatgcttctgaccacgatgaccccggacgtcacccaataatcgtgataatatgtagacaaaatgagcagggcagggagaacacaatagtctcccatgaacgatagcgcctgcccgtaaagcaagtatttagagttgggtttcagctgtttcatactggcagcacatactttgccgtcagctttgcatgctgctgaatttgtctgattgattcagccacatcctgtgaattactgcctttcagttcaaatgcagcaatggaattgaaagcttcaaacaatgtcaaatcaattgaagtgcctggtgctgcggccgaaaaagaaacgatttcagtatccccttttaaaagcccgtccggaatatcgatcgcttcaatgaccaaatcctcagcggtttctggaatctggccattttgtttgaaatgctgcgggtacaaatggcagtcggcgacatagtaaggctcttgatccaataatccgtccggcagatcggcatcttttccgaaacagaggacatctaataataattgcgccatatcaaggccgaaaacctttttaatgttagggatcatattccagccggcaaatctggctgccgattcaattaaacccggttctctgtttttcattagcttgacctctgtatgtgttgcgcaattttgcaggccaagcccttcatttgcctttttggcagcttcgacaattttcttttttgcctcttcatccagaatggacggcgtaatgtgggatgtctctgtaaacccgatttgcggcgttttatcatgaatggcgatcgggaaatactcaccgtcagccatgatgccttctatactgatatagtcggagtacccttctgtttgataccagtctccgtactcaccctgtaaaaattcttcagcgataaacggcgcttcaaacgtaaccgcctttggcacgttaattgatttcagatagtcattgactctgttaaattcatcttctgccgtctcagtgtccgtaatcagcgttacaccgatagaactcgctaagtatgtaggctttaagataagaggtgtgccgatctcttcaagagcagcacggaaatcttcaagagttgtgactcgtttgtttttgatcgatttgactccggccttattaaaagcgtccctcattttatttttatctctggcattttcggctgcctgcacgccggcacctctcaagcccagacgttcacaggctttcgccatcggagcaatgaataattcattgtttgttgtgatggcatccgccccaaacatttcggcaaccttgacgatttgctcgacgacctcttcctcaggcttgttatgatcctcatgcgcccaataaatggagtcaggatgctcaaaatcagctaaactcttaaaatagtctttatcttttacgaccgcgaccgagtatttttcaatcaatgctgcatgggaggctgtaattgcaaaaggtcttggaataaagctgaccaggttatatttttcagcagcgcttttataaaacatgtgcggcgggcagcctccaagatcagcgatgaccaatactgtttttctctccatatgtaaaacactccttctctattgtgcggtgtatcctccgtctgcggtgatggcgcttccggtcatatagcttgataaatccgaggctaaaaacagcatcacgtttgcgatttcttcaggtttcccaagcctcagcagcggatttaccttcgccttttcttttttgatctcttcaagtgtgccttcattattttcaaggaatgatttttcattcagcggtgtgtcgatgatccccgggcatacgcagttcacgcgaatgtgatgcttcgcataatcaacggccattgatttagtcagctgcaaaaccccgcctttgctggcgttataagcaggaatatcaggccatgccacgagtccgccgacagagcacgtattaatgatgttgcccttgccggcggccagcatatgcttgagtgcatgtttgctcattaaaaacatgccggtcaaattgacttgcagcaccttgttccaatcgctgagctccatctcgtgaataggcgccacgatttcgatgcctgcattattaatcaagacatcgagcccgccaaatgtatgaaccgccgattcaactgcgtgctggcaggcagcttcgtctgtgatgtccgtttgcacaaagtgcagcctgtcattattttcttttcgtaccattgcttctccctgcgcttcatcaatatccgccacaaccacattggcctgctggcccaaaaaagcctgaaccgcagcataaccaatgcctgatgcgcctccagttataaggacggttttatcggtgaggttcatgatcattcatccgccttcattttttttgcttttgctctgttgtagcgcggcgggaagaagatattaatcgattttgattctttttccgaacggttgatggcaccgtgatcttcacgaggctcacagaaataggctgtgccgaatttcatctcgactgtgcagccttcgaccgtcatgtcatagccgccgccgatgcagatgcctatttgttcattccgatgtttatggaaaggcatttctccgccatttccagggattttggcaagcataatttctacccaatcctcaacaaagaacgtgacttccatgcccggcagcaggtctcttgttttgaaaatatccaaaaagtagtcctcaggacttgtatatgtttcatcagctttcagccgcttgatatcaatagcaatcacttcttggtctgtgtcgtttcttgccccatgtggcacatgcggcggcgcgatataggcagattccaaggctgtcatttttcttgtcacatctccgacagtcatcatcagctcgccagaaacgaccatgccgatttggacctccttatgctgatggggttcaacattggtatgcggcgggacgtaagacattaatacttcagtatcccctcgtacggttgaatactgcctcactccgttttcccattcaattaatttcggtgtcgggaaataaagctcctgcatatcttctttagttttcatcatcaacgtctccttttccaaataatgaccagctcattggaatgcttttgaatgtttttacaaaggttagcccgtacttttgccgtgcaagctcattggttaaggcaatgtcatacaaaccttcttttacttttcttgcggcttgactggttgaattgactagtttgaaacgaacatctttgcgggtaaaatattttattaaattaataggtgaaggatgtgaaacaataacagatgtatcaagcatatcgtctctgaattcaaaatcaggacgaacagccaggccgtacatcggtgtatcgcacctgaagatctgcaatagctgcaaatccggcctcatgtagaaatgcttaatgccatcgtaagcatgtgggacgatggtatattccagcgggctttggagcgtcctttcgatgcatgattcaaaagtatcatgcaaggacaatttactgttcagcccttgtagaagagtaaaattggaaatgaaatgctttgctgcgtactcactgcttgtcccctcagggccgagcgtgttgactgtaatgagtttggatagtgaatcagttcttttttttgtctgaatgctattatccaatataatcatgagcaccaaccaatcttttaaaattttaagtaaattttatccagcggcaattgaactgtcaatgttttttgaaaatattgataattattcccatacaaacaaaaaaaccctttaaaaagggtttttaattataggaatttagaaactttgtttattgagataaggactgatcggccttctgctcaagcttgccgtactttttatatgcgaatatactgagcacaaatccgaggactgtgatggcggcgcaaatcaatccgacagctgcatagccgtatgccacatatacgggtcccattaaagcagaacctaatgtcacggccagattcgaggcgaggctgtaaaacaccatgacttttccgcgatgacgttctgagcagtcactcaaaatggtgctgagcagcgtcaccgtcaaactttgcattaatccccaaataaataggctgacgattaacagaaacattgacgccggcgcatatggtaaacacgccagcagaacgctgatgacccccagcgcaatcaaaagggagcgcatttttccgatgcggtcggctatctttcctgtaatcacactcatggaaaacccgattccataaatcatgataaataagcccgcagccgtgtttcctccggtaaaaacgtcctgaagataggtgcctaaaaaggaatacataccgtaaaaaccaatcatattacagaaggttatcgtgatataaacaggtacacgagggactttcagcgcatcccggaatgttcctgccggctcttctatttcttccttgccgctgtttttatgttgggcatggcggcgcatttcaaggagaatcagcaggacaactaaaacacccatcagggcgaaaatccaaaacgtccatctccaatgcaggacgccgccgataaatgatccgagcggcactccgaaaatcagcgccagcgaccagcttgaaacgatcagccccatcaccttgccccggtatgtataaggaacacgatcaccgacaactgcgtaagcggtcggaacaaacgctcccgcagccaatcccgaaagcgcccggcctaaaaagaagaaaaaaatattttgagccaaagcgcatatcaccgttcctatgataaagatcataagcccggctaataagctcagttctctggagtatttatcgcctaatggaaccaaaagcggcgcaccgataaaaatcataacgccgtaaatactgatagataatgcaaggacgctgacatctgagctgaaggcttttgctaaatccggcagcagcggtgagattacaagctcttcagatccggccgcaaatacccccatcgttaaagccagtgccaacaataacggaaaatgatgttttgttttgatgtcattgttttgattgctgttcattctttctcaaacacctcttccataatcttcttatcataaagttgtattatagtttagcattgttttttcactatttacaattcgaacgaaatatttataagttttattattttcatttaaatcccattatatatttctatatttcattctaaaaatacatgaggatgtaatgcgtaaaaaaagctctccggcctcccggagagctttttctattgtgcctctgtctgctttttttcaatcgtttcatgatttatacgctttttgatgcttagatgatagtatgcataacagaaaataatgatcggcacaccgcagtataagccaattctttgatccggaatgaaaataaggctgatcaacacgcagccatataaacaaaatccgagaatcgggactagcggataaagcggcgttctgaactccagatcattcacatttccgccttctgcaaggaaacgtctgcgaaagaaaaattgcgacgcacaaatggacatccacgcgacaactgtcaccatgcccgagattgagatacaccataaatacactgtttctgcggccatgacacttgtcagcagcgaacagcctgaaatgcctagcgtaatcagcagggcattcatcggcacgcctttttttgtcagtctggtgagaaaggatggacccatttgatttgatgaaagtgaccacatcatacgcgacgccgcatacaaccccgaattagcaacagataaaatggctgttaagatgacaaagttcatgatatctgccgaaaatgggatgccgatttgatcgagtaccgctacaaatgggctttcaatcacccccgccgttttgtacggaaggatggcaaccaagacgaacatagcgagcacaaagaaaaacagcgtgcgccaaatgacatttcgaatggactttggcagtgttttttccgggctttcactttcccctgccgcaatgccgacaagctccgttccctggaacgagaagttcaccatgaccagcgtaaacataacggccagcaccccattagggaaaagtcctctatcagtcataaagttagacaaaaagggtgtctcctgtccgcctttaaagtcaatcaagccaaacacagcggctccgccaatcacaataaataatatgatcgccgccactttgatgcttgaaaaccaaaattccatttctgcaaagcttctgacagagagcgcattaatcaaaaagatgacgatgccgaacacgaggcaccatatccagatcggaacggagggcagccacctttgcatcaaaatgcctgctgacgtcagctctaaccccactgtattcgcccagctgaaccaatacagccagccaatcataaagcctgtcgacggtcccagaaatttagtggcgtaggcctgaaacgatccggccaccggcatggcaacagccaattctcctaaacaaagcatgacgagatacattaaaaatccgccgatgatataagcggcaatggcgccgagcggtcccgcctggctaatggtaaagccagagcctagaaacagcccagtgccaatcacccctcccaaagcaatcataaacaaatgcctgcttttcatgctgcgctgcaattcatttttatgattctgcatcatccttccccctttggttcttttgccgtgatggtcatccggtagctttgcaaaagatgaacggtggtttgctgtatgaggagaggcaatacatgaaatgtgtacggtttatagactcgttctgtccatttatggccgtcttttccgtacacgcccatattaatggatggaatattcagcttgcgtatgtctttgaacggaatggtcccaatcatattccacccagggaagttcctgataaaagaatcaatttcgccatcggtttcgtgcagtgataaaaaactgccgtctgccaagtaggggaaaaactttttgaagacaaatgtttcgcctgtcgattcagcggttttgtcagccgcttcttttatcacatgctgcaaaagctgatctcttgcgctatcttctttcaaatagttatgcggcaggtaaggaggtgcgtaaaatagaatgacttttgcgccttgatcggggtcaagcttttgaagctcttcgattgcctgaaagcatctcatgcgaagttcaaggtgctcgttggctttgaatgtctgctcgatacactgctcgggatctatcccccggtttctcagcttttctaagtattgctccaggctatacacttgaatgtcccatgataaatgtttctttggcaggttggctctttttgcatattcttcataataatctgataatttttgttctgtctctcggcatgcttcctcagtgacttcaataagcaaatccatcatttcttttgctgttctttcataaataaaacaattgaagtacaagctggtgctgacagccgtttgcacattataggattccttgttatcacgctgatacaaacaggatgggggcagaaccaactccccttcaaccttttctgccagatggatgttattgtggagacggcttgtgatttcagatgaaatgaaatttgggtcaattcctgccagtgtatcgccaacatggacttcacgcccgtaaatgtaaaagcaaggcaacagttttcccgcggctccggtatagatatatcttgtctgatcaccatcgtaaagcggggtaataaaatccgtattaatagcagccaaatagtgaagctgtttttctttttttagccggttcagctctgaaatgctggcaagaatgcccgaatgctggctctcctcatcgggattggccataaacaatacatttcccggcaacgtctcaaggttctccgaaaaatgcaggagattggctaaatgcacggcgatgccgctttgcatatcaacagatcctcttccgaacatccaatcgcctgatttggcatcccgctgaacatcctgatcgaactcatagcggctgaaatactcggccaatttctcacaatcaaaagcgatatcctttaaagggccgaaatcttcaattccaactgtatccagatgggcatggtaaatgactgtatttcggctttctccatgtcctttaataaacgcaaaaatatttttgcgattgtatgggtcattgggaatggcctgttcccacacatgactggggttttcctgaaaataaggatagctcgtgatcacttctttgatgaaatctgcttttgtcccttctccaacggtgccgttcacgctgctgaggctgaccagagatgctgtcagcgcctccactctttcagccggattcatgtgactgatttttgtatactgcataaattgtcctcctgattaaaaagttgaaatcgtgcgatccgctaaagaatcgcacgattttatttctctcaaatcaaaaagcttcggacgttgttttggcttgcatatgaagaattaagtaatcgggaccgcctgcttttgagtctgttccggacatattaaaaccgccgaacggctgatagccgacaattgctccggtacatcctctgttaaaatataggtttccgacatggaaatcctcacgcgcccgttcaatgtgcgcacggtttttcgtcagaagcgcacctgttaatccgtattccgtgttattggcaatctccagcatatgatcgaaatcacgcgctttgcaaatcgcaacaaccgggccgaaaatttcttcctgcatcaagcgggcgttttcatcaacatctgcaaagatcgtcggctgaataaagtagccttttgaatcatcgccttctccgccggccaatagcttgccttcagatttgccgatttcaatgtatttcatcactttgttgtaggatgcttcatgaatcacgggacccatatacgtatcaggatcttctggattgccgacagtcagcgttttggtcagcgccacagctttttccaccacttcatcataaacatcctgatgaatgaccgcgcgggagccagcagaacacttttgtcctgaatatccaaatgctgagtacacgatagaggatgcagcaaggtcaagatcagcgtccttgtcgacaagcactgtgtcttttccgcccatttctgcaattacccgtttgagccatttttggcccggctgcactttggcggctcgctcataaatccggcagccgactgcacgggaacctgtaaatgagacaaaccgtgttttcggatgctcaactaagaaatcaccgatctccgctccatctcccggaatgtaattcagaacgccgtttggcagacccgcttcctccatgacctcgacaaattttgctgccactaccggggctgcgtcagccggttttaagagaatcgtatttcctgtcacaatcgctgccgccgctgttcccgccataatcgcaagcgggaagttaaatggagaaatgacgatgccgacgccaagcgcttcgtaatgatattgattgaactcgccagcacggctcttcaccggagccccttccttgagctttaacatttggcgcgcgtagaactctaaaaagtctatcgcttcagccgtgtccgcatccgcttccttccacggttttcccgcttccttcacaagatagcttgaaaattcatgctttcttctgcgcaaaatagccgctgccttaaagagaatattcgcgcggtgctccggtctttgttttttccaggaatcaaatgcctgcaatgcggcttgcatcgctttttcagcaagctcttgatccgctgtagacgcgtacccaatgatctcttctttatttgccgggttaatggaaatgattttgcggtccgtttcaattttttctccatttatgacaagcggataatgcttgccgagctgagtgtttacaaaggccagtgactccccaaatgcagttttattctttgcttccgtaaaatcggtaaatggttcgtgtgcgtatgtgactgtcatatgtagtccccctcgtgttatgaaatatatcttcgcatatgaataaaaatgcaagaatcatgccattttcttgtcttttgctgaaaaaacttgttgaatcgaacagaaatttgtctaacaggtgatcatctttctctatttccgatcttgaacgcaaatttattttgcgatttttgctctttaggcaaaaaacaaatgcaaaattattttgcggaggcttctcaaattagacccatccgcggaatcgcgatgcttctgccgattttctgatgcccgtcatgtaagccgccaaacgcatatccactttatgtgttgccgctgtctgataaattgtttcgaacgagctgaccatgacgcttctcaatttttctgcaacctcttcttccgaccaataatatccttggttgttttgcacccattcaaaataagaaaccgtgacgccgccggcactcgccaggatatccggcacaagcagcacgcctctttcattcaggatcttagtggcatcaatggttgtcggtccgttcgccgcttcaacgacgattgacgcctgaatgttatgtgcgtttttggctgtgatttgattggagatcgcggcaggcactaaaatatcgcaatccttttcaagcagctcctcatttgtgatgacgtcagtaaataaattggtgaccataccgaagctgtcccgtttatcgagcaaataagggatatcaaggccgtctgggttgtagagcccgccattggcatcagaaatcccgatcaccttcgcgcccgcatcgtgcatgaatttggccaggaagctacccgcgtttccaaagccctgtatgatgatgcgcgcgttttgcagcttgatcccttttttcttcaccgcctcttcaatacaaatcgtgacgccctgtgccgtcgccgtttcccgtccttgcgatcctcccaaaacaagcggtttacctgtaataaagcccggagaatcgaattcccgcagccggctatactcatccatcatccacgccataatctgcgaattggtgtatacatctggagctggaatatcctttgtcggaccgacgatctggctgatggcacggacataccccctgctcagcctttccagttctccaaatgacattgtccgcggatcacaaataataccgcccttcccgccgccgtaaggaagattggcaatcccgcatttgagcgtcatccaaatggataatgcctttacttcctcttcattaacttctggatggaagcgaacgcccccctttgtcggaccgacagcatcattgtgctgtgaccggtagcctgtgaacactttgacgctcccattgtccattttgaccggaatgcggacagtgagcattctctgcggctctttcatgagttcatacatatctcccggataacccagcttccgaagggcttccttaatgattgtttgggtagacagaaataagttaagagcttctttttcttcatctttcgagacttgctttgctgacatctttttcacctcattgtttttttggccggctgtaatgtaaacgctttaaaaaatcagcccgccaattcctttctgcattggattcacccttatcatcatgcaagatccgtaccagcttttgaatccacaaaaaaagagactgaaaacatctcagtctctgactacaaatctatcgattaacggggatcaatcaccagctgcgtttcagcataaaaactgccgattcccaaaccgtttactacatcgcctttaatcgtgtaagtgcctgcgcgaggaagagttttacgcaccatgacaaggtcaaattcggatgcgcctaacaaatcaagcgtaagcggaagtctgactgtttttccatcgtttaaaatctgtgtttctttcagtgttcttccattcactgaatctcttgtcgtagcatgaaacccgtcaggaaattgaaattctaccgctccaagagaaagcaccgcatttggtttatatgtcacttcaatatcagaagtggtccactctttcgtgctgttaactgtttttgcctcgattgatgcagactgtgcatgagcttggcccgaaggaagtaagattgatagtaaaacagctgaactgatgaataatgaagatacgaatgaagttctttttagcatgacatttccccctaattgattgttgaaatttggccagagcgtcctctgcagaaaaagcgctttttcataattcgcgaattaccagttctttttcttaaaaattaatctatcatcattttccatggaagtaaatgttttttaaggaatattaacacttggaattcaatgagaattccttcctgtttatacaaggttcaaatggacgattctcctctctttttctagtaaaatctgcctgacattttatatcttttatcctattttaaaaaagggcaaaaaaagtcgaagatgcctctgctcttcgattgatcacgttcctatttttatctgaattcagtgttccagttaaaaccgatcgtctcatcatcccacggaattcttttttcatcaggctgatccgggttatacgacatggtggtaaaatagataattgtcagcggcgtctctcccagcactctatatccgtgagccaccccttttgggattaataacagcatcgggttgtcttcgcccatataatagacgtccgtttctccttttgtctttgaatcctctcgaagatcgtataggacaacctgagcgtggccggttgggaagaaccagagatcatcctgcttctcatgataatgaaatgccttaatcacacccggatagcttttcgaccaagaggcctgcccaaaatgctcaaggaggttctcatcgtcccggaccagctcagcaaaaaagcctctgtcatcgctatgcttcatcaattttttcaccttgactccatcaatcacacgcactgctcctttcctgcaaatactctcgtaacgcttcccgccagtggcgggggcggatgtcggcttcttcaatagcccgatggctcagcacagagtatgccggacggggcgttttgttcccgtattcctctgtcgttacaggcaaaatggctgtttccagcccgctttcttccataattgccgtcgcaaactcataccagctgcatatgcctgaattgctgacatgatagatgcccggcggatggctgaacagtttgatgaccgcttctgctaaatccttcgtataagtcggcgaaccaatttgatcgctgacaacccgaagctcttgtttcgtttcagcaagcttcagcatggtttcaacgaaattactgccgccatgtccgtacacccacgatgttctgatgatcgtgctgtcttttgtcgttaatcgtatcagttcttctccgagccttttgcttttgccataaatggttttcggatcgaggggatcatcttccctatatggctgggttcctttcccattgaatacatagtccgtgctgatatgaacatattgagctccgatgcgggttgactcaagcgctgtataataagcgccgattccgttaatcaagtacgctttatcaagctctttctcgcattgatcaaccgacgtaaacgcggcgctattgaccacgatatccggctgataatggccaaacgaatgccgtactgagcgctggtcagcaatgttcatcatcttctttgttaacgcaatgacctcatatccggcttgcttcagctggcggcatagttccaagccaagctgtcctcccgccccagtcaccaatacctttgtcaatcagatcaccttctcatcggtcattgtctgtataccactgaatcgtacgcgcaatgccttcttcaaacgtcacttcctgccgccagcccagttcatttttcagcttagatgcattgatcgcatagcgccggtcatgcccttttcggtcttccacgtgggcgaacaattcctcacagcccagatgcttcaaaatggcactcgccagctctttattcgtgcgttcatttccgccgccgatgttatacacctcgccgtcggtccctttttctaaaatcagcttgatcgcgcggcaatgatcctccgcaaacagccagtctcggatctggagtccatcgccatacagcggaacaggcaggccctgcttcgcatgacggataatcgtcggaatcattttttcgctgtgctgataaggtccgtaattgttgctgcatcgtgtaatgatggccggaagcttgtgggttttcacataagacaacacgagcaaatcagagcttgctttgctggctgagtatgggttattaggagaaagcggcgtcgtttctgtaaacgcgggatcatccgcttttaaatccccgtatacctcatctgttgaaatatgaatcagcttcttggcttttcctttcaagaccgcttccgccaatcggtatgtccccatgacatttgtggtgataaacggctctgcttgggaaatgcttctgtccacatgcgattctgctgcgaagtgaatgacgccatcgtaggtctcatcaaacgcgcggtcgatatcctcctgaacgctgatgtccccttttacaaagcgaaaacggctgttttgctttaatttttccatttcctccgggtggctggcgtacgtcagtttatctaaaacggtaatgcgcgcatccgtttccctcagcatgagctttgtaaacgtgagcccgatgaagccggcaccgcctgtaattaaatatgattttgccatcacttttcgtcctgtcctttccgtaaagcctggtgtacaagctgggaagcgagataaagcgattcgtgagttccggcatctacccaccagcctgataacacatcatacgtaagctggctgttttcgatgtatagattattcacatcggtgatttccagctcgccgcgctttgatggtgatatttgttcaatatatgaaaacacctctgcatcatacatataaataccggtaacacaaaggttggtcggtggctgttcgggcttttcgatgatggaacgaatccgcttgtttttctcatcaatctcagcaatcccgaagcgttccgggtcatcaacttctttcagaagcacttttgctcctttcccctgctgttcaaagcgttctgtataaggctttaatgaatcttcaaatatattatcacctaataataaaatgaaagactcttttttcgtaaagcgctttgcataagacagcccatccgaaatgcccgatgctgccggctgtacttgataagtgatagtaacgccaagctcttccccgttcccaagcagtttgtaaaattgcggcatatgctccttttggctgatgagtaaaatgtcttttattccggcttcctccagcttcataatcgaccagtatatcatcggatacgggcctacaggaagcaaatgcttgttgacggctttcgttaagggcataaggcgtgagccgtttcctccggctaaaataacacctttcacattaacacttccttacatgcatttttatatctcttgttcatataaatcttgaagaatagctgttacccgtataatgcctttgccatccacgagcggccttcctcccttgtgcaaagaaaggcgaagaggatagctgctcataatgcgtgacatctgatagatgagtgtttcatccggtacaagctcacccaagccaagatcaagagcggcgccttggtcagcaaatgttttggctgttgccgtttgatgcccaacctgagaaagaacaaggcacggcacgccgatgcaaatggcttcatatagagagatgccgccggcgacaatggctgcgtccgcttgtttcatcaaacccgccatatcatttgtctgttcgatcaccttgtactgcggcttcttttcgatccgccttcggactgcctcttgatgcggtgaagcgctccccatcacaaaaatcatgtttttgtcttttatgccggggacttgatcagcggcagccagcactttaaaaataagctgcttcggatcacttcctcctaatgcaacaaggatattgcggcagtctttcttaagtgtgtaatcctctcttgcggcctgaaaggcggggtgaagaataagatagtccggaccttcataaatgcgtgtgtttccctgaacgtacaccctgcttctgatgtcaccgtaaattccgttaatgactgcgtcactatattgaattgatttaccgtttttctcttcaaaaagaacaattttcgcatctgtctccgtctttattttctttaacagctctgcaggcgcgcctagaatatcaaacaaaagcaaatcaagcttcttgctttttatttcccggagaataaattcgtgctgctgcagctccggctttacgatgacacgccaatgctcttcatgaagaaacgcttcagactcctgattcgtataaaacgtaatcaaacatcgctgtttgagcccctccgcaagtctcttcatccggacaacatggcccattcccttttcatagccgccgtctgcgaagatcccaacacgcatggctattcagcctctcgttcgattgccgcatcggggttccggttcagaagggtgataagctctgaggcggatacaccagggcgctcgcctgctttttgatagagggcctttatcgattcatagtcttcctttgtatcaatggtcagccgatattgaggggcgcgaaatcgttccggcgcctctaaaaactgaacacgataaagagctggatgattccttatatataacgtgacatgctcctgatattgatcctccatattctgaatacggctgatgtcaattaataggttggcgttgaccacttcgccgcaaatccctaatggggcattcaggatatacgtataatccgatccttgatcaaaatgcgccttaatcattacatcgagcagctccggatcgacaaacggattatcacccgttaaccggatgatgactgacggtttaacagcttctatgaccttcacaaacctatcgaggacacgttcttcgctcccgcggaaaacacgaaagccttgtttgatacagtgcgcctctaatatgtcgtcagtttctttgtcagacgtggcgatgacaagattatcccgatccttttggtaaaacgcgcttttccggacacggtgaacgagaatgtcaagtaaacgattcgatccgagcggccgaagcacttttcccggaagccttgttgaacccattcttgcttgaatgataaagagaatatcattcatgaaacgggctgtccttcagtaaaatgtcatcccagacaatgcctgtgtcggctggaatgtctcttacagcccgaacaccgctggtcagcagttcaaaaaatctcgggtgcagcccctgcggcttttgtccgggccgaagcactgcgatattgtcttcactaaaggcttcacctttttgaatcggagctgttgtaaaaatgcctctgtatgcaaaatttctgatttctccttcgatggaggttgttgttttgtatgaactgccaagcagtttttcagagaccggctttgtgatcccctgtttcagctcagcttccgttttcctgatgccatcgaccatttctttcaattcatccggatttaatgcaaacgagtggtcggcacccggcagatctttatcgatcgtaaaatgcttttctatcagttttgctccgagccgaaccgcggcacacggcgcttctgtcggatgctcgctatgatcggagaagccgattactgcctcaggaaaagcggcggcaagcatcggaatgacgctgaggttgctgtactccggcggtgctgggtatttcgccacacaatgcattatggcaatttgattgtttccctctgccctgatggtgcgccaagcttcgtgaacatcagagatttcagctccggctgtcgagaaaatcatcggcctgttcagccgggcgacatatttgagcagcgggagatggttaatttcataggatgcgattttaaaagcgctcggcgaggtagactgaagcagatcagctgacccctcgtcacataccgtacttaaaaagatcacctgcttttcgcggcagtaatccaatagcggtaaaatccactcagcgggcatttccatagattgaaccaaagaaaaaatagagacgtccttgcccgctgccgtcttgtacaaaccaggatctttctggtacatcctatcagcttggaacatttgaaatttcacggcatccgctcccgcttccgccgcggcgtctatcagcgcaaaagcctgatcaagcttcccgtcatgattaatccccgcctcagcaataataaaaacaggagcgtctttgcctacagttttattcgcgatctgaaacgctgccattatttcgcctccttgcccggccaaatatgataatagtaatacgattgttcagcggtgaagcccattcgttcataaaggcggatcgcccttacattgtgaagctgcgtccccgctgttaccgttctatgcttctgggtctccggttgttctatgagattcgccaataaatgaaatgcaatacgttttccttcaaatcccggctttacagccatcaaatcgagaatgcattcatcatctcttgataagccctgaagatagccgatgacctcgccattgtgtttagcgacaatattgaccgccgcccttccattcagattgtttcgtgtccactcctgaaatattttgtttgctgcatcgcggctgagatgaggatcctgaaaatatctgctttttgtaaacgagtctcgggccagctcacatatcgcttctgtgtccccgggctcaggcgggcccagttcaaaaaatggcggtgttttgtcataaaaagacggaggcatcgccagcttcagcaaactcccgacaaagtaagaggatggctgctgctgtatcacatgcgcggctccgatatcttcagccggaacgcggacaaagataaaatccgtttcatccatttggcgtacagtataaaaagcttcaaacagcctctttagctgcccggtactatttgccgcaagaagtttgacgttgatgactttcttctgaagcaccttgctttcccacaaagaatcttcgtaaagcaatacgccttggagcctgctgttttcaaaaaggccgagggaaaattgatacggaacatccagtgtaagctttctgctttggagaaattcctcaattgcctctttggagacattttcttttaccgtatacacttaatcagccccttttacgatatcccgcacagcttcaatgacatcatctacatcgtcgtcagacattgatggatagagcgggagagaaagggttcgtttatagtaattcatggcattcggaaagtccgcttccttatatccaaattgcttttgataatacggatgaatgtgtactggaataaaatgaacgctagtgccgatattgtatttatcctttaaagccgtaatcatttcgctgcgcgtaaccccggcttttttttcatcaacttgcagaacatatagatgccaggcgtgcctgccgtcatcatggacaaacggcgtgatcagcccaggaatctgctgaaaagcggtttgatagcggccggcaatctcttctctccgtttctgcatatcatccagccgtttcagctgatgaagtccgagggccgcctgcaaatcaaacatattcatcttatagccgggcgattcgacttcatagtaccagctgccatttgaagaataacggttccatgcggctttactcatgccgtgaaggcttagcacccggatcttatcggcaagctcctcatcatcagtcgtcagcatgccgccttcccctgtcgcgaggtttttggtggcgtaaaagctgaatgccgttgcatccccgatagaaccgatcattctttgcttataagtcgtatataccgcatgtgccgcatcctccagcacgaataaaccatgattttgggcaacagccaatattgcatccatatcgcaggactgcccgccaaagtggacgggcacaactgctttcgttcgcggtgtgacggccgcctcaagctttaccgggtcaatattgagcgtgttttcgtcaatatccgcaaacacaggcgtcgctcccgtatgaataatcgtattggcggtcgagctgaacgtaagcggagaggtaatgacctcgtccccgggcccgatcccttttgctttcaaagccaaaaataaagctgcggtacatgaattcaccgccacggcgtgcttcgccccgacaaacgcggcaaactctttttcaaactgctgaaccttcgggcctttagaaagccatcccgattcaagcgtttctgtaacctcctgaatttcttccttaccgattaacggcaatgagtaagggagaaaatgatttctcttttgcaccatttctttgcgctcctatcattttattcagtatcttcccgcctgtaatcaacccctgttttggctttcagttccgcaaataaagcatttgttgattctgccaccggataattagccgctatgaatgccaggcgcgcctcttctgctttttgatgcacgtcgggacttcgaagaacttcaaccaaggtgtgcaccagttcatccggctggtcaaacataaaatcgccaagagactcataatacggatacgagcgatttccggacgattttccgatcagcacaggcttttgaaacagcatggcttcaagaccgactgtcgaggtctgcgtcactgcggcatcagcatacggcagcaaatcataaagctccagctcctttttgatgactctgcatgctttatgttttttcgccgcctcgtgatacagatcaagcttgttttttccgatttcccacgggtggggtttgataatgatctgcagctgcttctgatcagaaagcccctgcagcacaccggaataaaagtcttctgaaaagggctgagtggcaatgagcacaatttttttagtcggctgaaaagcaagttttcgatagaatatggacatatccataggcgttctgttaaaaatctgatcgaagcggggatgtcccgttacgagaatctgctcgggtttacagccttttcgtatgaaccactctgcttcatacgcaccaaaaacagcttgataggttgtaaaaacaggaatgaaggcttcatctcccatcaatgcgccatgctgaagacaaatgctgacggccccttttctttgacacatgagagcgagcaccctgctgtaaatgtcttctgccgttccgacaataacagctgaaatcttttcctgttcaaacagcgcatcaactgtatcaatggcctctataaataaaggaatatctttgaaaagccggtcgcgaaacgcttgatcaccaaatgccgggtgatcatcataaggggcgagaagcgaacaggctgtttcgagatactgcttcgaatcgcctttttggcatgaatccgcaatctcccgcttgctaattacaggcagatcacaataatgcggcaaactccatctggccaaaacagccgttttttcaggatcaaattgatagtaatttccgtttgaaaaacgcaggtaatcaaagtgcaaaatgactttccctttaacaggtttgtcatttgttttaacgattttttggattctttcttcaaaaaacggctgaatctgtccctcatcgatatgctgatccaccgatccgaataattccggttcttcttccatcatcaccctcagctcagggctgatgtattgataaaaattactgataagcccaagcggaatccctttgtagcgaagtttgtcaaaaagctccacgtacttccggtacagcacccaataattgcttaaataggccgacaagctctcaccccattccaagcttttttaatgattcacgcagctctcggcaatttcgctgcggaggaaggttcctgacaaattcatttttttctgattcaaacagctgaaagtgaatcgattggtcggtaatataattcaggtccagctcctcatccagtgggtaaaacggataaaaatgattgactctccaaaagaaccgcgcatctcctatacggtaaaacgccgggctttcatcccaataggagccaaacttctcctttaccttctcaagcaccgaatacctgtgcatcaccgagcaatgatcaattgcgcacggtgcgttccatgtcacttgagcggcaggcctgacagtttcttttacaatgtcgcgattctcgtttaaatgataggttttggaggctgagtaaatcacagccttttcaggatgggtatcgagctcccgcaccattttcaggaggcggtccggcatatagatgttgtcatccgtcgcataggtgatatattcaccctccgccatctcaatcgcctgattgatcagtgccgcgtatctcgttttttctgttctttccttcactccagatatatcgctttgataaaaacgcactcggttatcattcaaaaaaggacggattacattcagcgtctcttcattggagttgtcatccataataaacaattcaaaatctgaaaatgtttgtgagagtatgctagaaatggactttgccacataatcgcttttgttatagctcgtcataatgactgatactttaggcaaatcctacacctccttcttggaacttcacacctgaaactatcgttatcttatgttgcttatgctcaagttgcgctagggatacaaaccaatatgcgaaaagtttgtgtatgtctctgaaaaacagcggctgcccagagcgaaatctgatcggtccgctgttctttttcagcataatccaagcatcagcctcataaggtgaaagagataaaaatcgcaccagcgactaagatcgttttccatcggaggtgagtcatcgcggagcgttcacctatacatccagaacatgttttgaatggttttcataaaaaggaggaacgatatgaaaccgaaaaaaaatcaatatcagcaaatgcaggcatttgataatatgcaggggtatcagcctcagtttggcgccaacccgtacccgcagcaaggccaaggctcacaaatgcagccaatggggatgcagccaatgatgccaatgcagcagggacagcaaggacaacaaggacagcagggatttggattcccgggccagcagcagggcggcggttttcaaattccatcggggcctacaccgtcaggaccgggccaaagcgttcccggcatgctgcctgttgaggaatcttacatcgagaatattttgcgcctgaatcggggaaaaacggccaccatttatatgacatttgaaaacagcaaggaatggggctcgaagatttttcgcggcgtcatcgaagctgcgggccgggatcacattattatcagcgacccgaaatcaggaacacgctacctgctcctgacaatctacctcgattacattacatttgatgaagaaattgcttatacgtatccatattccatggcgtcctattcgccaagataagaaaaaagccaatcactcatatgatgaggattggcttttttgattatagatatttgacggctgcgacaacgatcataatccaagaaataataaacgccacaccgccgagcggggtgatcgctccaagaatggagatttgcgtcacacttagaatatataagcttccggaaaacagcacaattcccgcaaacatcagccagccggctgtcgtgacactgcctatgccggataatttatcagccagaaacgcgacaacgaataacccaagggcgtgatacatatgatactgcacgcctgtgtgccaaacctgaagatatttatcaggtattttcccttctaatccgtgagcgccgaatgctccgagtcccacggcaagcagggcgttaatagcccctaatatgataaaaactttcatctatctctcccgccttttcgttaaactcatatcatttatcttatcgcacctgcaccaaaattcaatgtttgttctccgttgacacgagattgtcggattttctcctgcgccaaagctggaactggtcagctgctattgcagcaagcgtccctaatacgagcccgttgcttaatagagaaataaataccggatgcaatccctttaacgcagtttcaggaacaaacatgataccgacccctgtcagcagtgagatgccgatgatagacctcaccctttttgattcttctttctcatacgaatcaaattcggcaaaggccagaccgcccattgcggagaacacaacaaaattcaccgcaaatccaacgggtgacggcaggctcgcaaacgtattcataaaaaacgggatcacgctgattacgataaccagaatactgccgagtataaacggttttttagaaggcatcttggtcgtttcaataaaacctgcggctcccgaaatcggaacaggcgcaatagctcccgtcaaaccgctaagcagatggctgaatgaagctgcaaaaccggcatggcgttcatgatgctttccatcaggctgtttgctgaattttttcacggcgatgtccacgaccttcatgctcgccagcatattcacgatcagcaagatggtaataaaaatagaagtgatgatcaggccgctgttaaataacggtggcccaaaaggaaacagggaaggcagctgaaacagccggtccggcatttcaatcggctttgccgctccggcagccgcaaacagcacccacccgccgaacaaggctaataaaatagaatattgcttaaaaaacacgatgttcgaatttgtcattataaaggcggcagcgatcacaacaagcgccaggccaaatacaagaccgtccaccccgtcctgtcgataaccgattccgagaattccttttataatgggctgactcagctgcatgacaagaagcaataaatagacgcccgttacaaccggagtaaacaattttgcaagtctgtcaatgaccttgaaaacacttaacaaaaagaaacatacagcgcttacaagaagagctccctgcaacccccgcagtgtgtctccatatgtcgcaaacacagttcccgttagccctgcgtagatcgtatacactccccaccacaagccggctgggctttcattgatcggcagtctgtggcctttcaaacactgaatgacggcggcaatccccagtacaaaaaaagtgctttgaatcaatctcgcagaatctgagtgatccagatgaaacgactgggcaaccgccaccggaacaactatcgccgcagcaatgataaacgctgtccattgcaacgcgccaagaaccaatttcacgtaagctcaacctctctctttaaaaatcaaataaagactctccgtttccatcctcttcctgcttctctttttcttgctttcgatatttgtttaatcccgcgctccccatcattttttccatcatcagctggtctgtcgatggcggcgcggcaggacttggcgtaacgctcggctgtatgcggggcgcgctcgcgttctccggctgatcaagcacgacatcacacagagaacggacaaccgctacataacgcttcagctcctcatcccgttcagctgtttttgcttttttcagctcctcttccatcttttgaattaatgcagatatatgaatgttcatgaagcaccctccaaaaaaataaatgttgtcttcctgcattttatcaaattcctgctgtaaacgcagatatgagtttgttattttttctgacaaaccttgcgcgattgacaagcagaagagatttttcacataataaatcaccatacattacaaaaaggagaaacggaatgaacagcatcccctctatcatcagcaagcataaagcctattttgcggcgggacatacgagaccgcttgaatcgagactgaacattttgcgaaagctgaaacaagccgtcagaactcatgaagccgatctcatagccgctctctaccaggatctccacaaatccgagcaagaagcatactcaacagaaatcggaatcgtcttggaggaaatcagctttgtcatgaaacggctgaaaaaatggtccaagccgaaacgagtcaaaacgccgctgactcatctaggctccaaaagcatcatcattcctgagccgtatggaaccgttttggtgattgcaccttggaactatcccttgcagctggcgctttctccgttgattggagccattgcggcggggaacacggtcgttctcaagccatcagaatatacgccggctgtttctgctattctttccaaactcatcagcagcgtttttccgaccgattatgtcgctatggcagaaggcgggcccgatgtcagcacagcattattacagcagccctttgactacattttctttaccggcagcgtagccgtgggaaaagtcgtcatggaggccgccgccaaacaattaattcccgtaaccttggagctcggcggcaaaagcccctgcatcgtccataaagatgctgacattcagcttgccgccaaacgcatcgtcttcgggaaatttacaaatgcgggacaaacctgcatcgcaccggattatttatttgtccacgaggacatcaaaacgaagctcacagaagaaatgaaccgtgcgatcagagaattttacggccctcagccggaacggaatccgcagtacggcaaaatcgtcagtgaacggcactatcagcggctgctcagctttctgaatgacggcatcccactcacaggcggacaatctgatcccaatcatcacaaaattgcgccgaccattctcgaacaagtgagagatgactctccagtgatgcaggaggagattttcgggccgattcttccgctctttacataccgcaatatcggggaagtcattgagaaagtccaatcgcgccctaagccgctcgccctgtatctcttcaccacaaacaaagaaattgagcgcgctgttttaggaaatctgtcgtttggcgggggctgtgtcaatgatacgttaatgcatgttgcgacgccgtatttgccattcggcggcgtcggggaaagcggcatcggcagctatcacgggtttgacagttttaacacattcacgcacaaaaaaagcgtcgtcaaacaaacgaaccgtttcgacttcgcatttcgttatccttcctccaaaaacgggctgcgaatgattcgaaaaatactcaaataaaaaagcgcagataacctgcgctttttacaaatccttaatacaccaatcaatcggcgcctctcccattttctccaaataggcattcgcccgggaaaacggtctgctcccgaaaaatccgtttctcgcagaaaacgggctgggatgcgtcgattcaatgataaaatgcttggacgtgtcgatccgttcttttttcatttgggcatgccgtccccacaaaataaaaataaccggccgctccctttcattcagcacgtcgataatccggtctgtcagtcgctcccagcctttccccttatgggaattcgcctgtccgcgccttactgtcagcacagtattcagcaaaagaacgccttgctttgcccagctcactagcgatccgtgatttgggatgctgcacccgatgtcctgctgcagctcaagaaagatattttttaacgaaggcggctgctttacaccgggcttgacagagaagcttaaaccttgagcctgtcccggcccgtgatacggatcttgacccaaaatgacgaccttgacatcatcatatgatgtataatgcagcgcgttgaaaatatcccggctgtccggataaatcgtttgctccgcgtattccctcttcagcatctctctgagctcttgataatacggtttctcaaactcttcctttagctgattccaccagctgtcttgtaaaagctgtttcaagattcaggcctccttacgaacgatgaagtctggaatagacaggctcgccatcccaaaccatttcactttttgcttcccgcctcttcatctcaggctcttcaagcaggacggcaaagtttttcgtcggcagctccccgagtccgtgcttttcacttaaacgatccaaatattgcttccgcttggcgccaaggtccgcagactgattgtctcccacgtcactgaaggcataaatcacactggcgcaagggacacgcttcacccggtaatccttggctgcgcgcagataaaaatcccaatcccagtaattgtgcacatcagcatcgaaatacccgatttcatcatgcagaaaacgtctgtacatgctgcccgacggcacgtatgtagaaaacactctcatatcctcatagtcagcggtataagcaaacaatttccgtgacactggataccttgttccgtttttctcttcaaacgaaactatttccgcatcagaatgaacgaagtctgccgtttctatttcctttgccattttctcgatatgccctggcgtaaagaaatcatcgtcatcacacagcataatgcaatccccagacgcctcttttacaccggcatttctcgcagccacatgccccgagttcttttctaaattgatgacagcaatcggtagctccggatacagtgctttgaccggcacgaccgattccccggcatcattcacaataataatttcatacggcttcaaggtctggcgggaaatcgactccaaaagctcacacaaagccggaatccgattataggtcacaattacgatagaaatcttcatgatgctctccttctcattttcatagtcatgtactattaaaacatatattggacgggagatcagtgggaatatcctactgaaacggcatactacaatgatagaaacagcaaagtggctccgatcagaagcaccatgatcagcatcagatctccaaagacatgaaagaaatctttcatgcggacgccattcggaaggataagacgccacagcttagattgatagaccggcagcagcaccagtgcataagaaagacacaaaaatgtaaaagccggcggcacaaaagcacagcctgcatcgtcccaattcatcatgatgtctttcatactagatccatccaataaaaacaaagatatcatgagggctagcaacacaaaggaccccaattgaacctcaaacaggcgcattttctggttatatgcaaatcggaccgcccaaaaccagacataagcatatgaacatagcagcgtaagaatggcacctgctgtaaagacgacatcaggcagccgatcaagcagaaaaacaaaaggcaagctggctgccatagccaagagcatgcagccaccagtaaacaaaaatactgccccatgagctacaaaaccatataaacaagagctaatcctcacgacatacacctcctttacatagaaattctatgtatatacctaaaaaatcagacaagctgacgcctgccaatataacagcccattcggccaaataacggaaataacagcgttgcaaaagcacaagttccaacaaaccaaggtgtcaacaaggattgaaacagcgcagcaggaattacattgaatagaaaaacaagcataaaaatgacgtttggcaccattgagatcagaatcgtatgtagaacaagcttttctccgcgttttccaaactccttcacgccttgatacccaatcagcacccagtagatcatatatgcagctaagatcagccaaacagaaacagaaatgcctttccatactgcttgaacaaacggtgattcaagccatacatgcattattgtaatcgcaatgccgacagcgaatagggcactgttacagaaaagatggaacatcaaaaacgcacggaacgttactggctgtattttcttaaacgaagaaacaatgtcagttggtgttccaaacgcctgcaataaagtctgcatagcttcctcctcactctttccttcctgaaaagagcgaaacagatgatgttcaatatggctctcaatctcttctatcatcgcctcaccctcaggaagccctttaagcccgcttttgatttcggatacatatgtttctttatccattttgtccgctccacttcagtattcggtccatcatggctgaaaatacgctccattccttcgtgcgttccgccagcacttctttgccctcgtctgtaatccggtaatatttgcggtccggtcctttctcctgcttctcccagtaggaagaaatatacccttggcgttcaagcttgtgaagagaaggatacaaggtcccttctttcatctgcagttcatttccgctgcggcttcccatttcttttacaagctcatagccgtacatcggccgctcgttcagaagcgtcaataccaatataaccgtgcttcccttaaccagctcacgatttaacatctcaaaacccctacctagttttcttatgtagcattttacgaaagcccgttgagattgtcaaatgattcctatagatcttctatattgtgatacagagaaaatctaactataatgaaagacaaaacacgatggaggttcaagacatgtctatgcataaagcactcaccattgccggctcagattcaagcggcggtgctgggattcaagctgatttaaaaacatttcaagaaaaaaacgtatacgggatgaccgccttaacggtgatcgttgcgatggacccaaacaacagctgggaccatcaggtattcccgatcgatactgatacaatccgcgcccagcttgcaacaattacggacggcatcggcgtggacgccatgaaaacaggaatgctgccaaccgttgacattatcgagcttgcggcaaaaacgatcaaagaaaaacaattaaaaaatgtggtaattgaccctgttatggtttgcaaaggtgctaatgaagtcctttatccggagcacgcccaagccctgcgtgagcaattggctccgctagccactgtcattacgccaaacttgtttgaagccagccagctcagcggcatggatgaactaaaaacagttgacgatatgatcgaagccgcgaaaaaaattcacgcactcggcgctcaatatgtcgtcattacaggcggaggcaaactcaaacatgagaaagccgttgatgttctctatgacggagaaacagcggaagtccttgaaagcgaaatgatcgatacgccttatacacatggcgcaggctgtacgttctcagcagccgtgacagcggagcttgccaaaggtgcggaagtcaaagaagccatttacgcagcgaaagaattcatcacagcggccattaaagaatccttcccgctaaaccagtatgttggtcctacgaagcattctgcactgcgcctgaatcaacaatcataaacaaaaggggctgcctaacaaagaggcagccctttttaaatcaccgaagacttttcacagaaaaaactgccgatcccatcggcagcctgtttatttgatttttaaattgtttgcagatttcctcaaaaatgtttctatcgactgaacaaaaagtgcatattccttcatttgttcatatgcccgcgtgagaatttccgccgtttcactgtgcggcgttgttccgccaagcatttttttcagctgaagcagcacatccttatattcttcccgcttatcttcaacttggttagcagccttttccaaacattccggtgttatcttctgttcatttatattcaagaaaacaactccttttacagaaaaaaatagtaggttatcgttgaagaatagcacagatggctcagatttcacataagaaaatagaaggattttctacataagtgtccaaattctgacattcatttcagatttcccggtcgaactggctgttacttcatgatttcccgggaaaggaaaatatctcgcactaaagacctcttctccgttattgataaagatttcaacagaggatgcgtcgataaacatgtgcacggtatgcaaatccttgatgcggcaatgtctcgcttctgttctttttccgtcaaagccctttcgttccagcgtaacattccccttgtctttatggaaggaaaacgtagccgttccgcggatactgattgaaaagcctgactctgtatgaatgtcttccagcagaatctcagttctttcaggtttttccactggaagcgtaccagatgatccatgcatgttgatgtgtatttttttctcatttctgcgcatggcttttagctcaggcagcggctgctgaatcagcttctcgcctgatattgtcagctgtctcggcagcgtcatgcagtgaatccagtgatagtcaatcgtcggatgagatccttcatcctggtcaggcacagccatccatgcaaacaaaattcgtctgccctgatcatcttcaagtgtttgcggcgcgtaaaaatcaaaaccttgatcaagttccctaaaatcaccatgcttcagttcaggcttgttataatcgagacgcccgacaaaataacctgactgatatacgttctgataaaggaaaccgtcagcctcaagcccttgaggcgaaacaatcagcacgtccgatccttgaagggaaaacaaatcagggcattcccacatgtatccaaaatcgtccagcccgttgaagcccgcgccggttatcgggccaagaaatctccactcactcaggttatcagaagcaaacaatacagcctgccctttcaaattctctgtttgcgcaccaatcaccatataccatgtgccttcatgctcccataccttcggatcgcgaaaatgcgccgtatatccttccggaaggcgggcgacaacaccctttttctcaaaggacagcccgtcgtcagaaacagcaaggcattgatacgtttcccgatttccatcctgatccctgacatttcctgtgtaaaacagatagagccgatcgtctttcgtgacagcgctgcccgagtagcagccgtttttatcaaaccaatcactcggagccagcgcaatctcttcccgcttccaattcacaacatcctgtgtcgtataatgcccccaaaattttgcgccgtgccccgtctgaaacggctgccactgaaagaatacatgatagctgcccttccaataaatcacgccattcgggtcattcagcagcccaaccggcggcatgatatgaaaatgctggcggtgcggatcgctgttagcgatgggctcttttttctccacttcttcataagcccggcgacgaagctcctggtcatgtgctgtcattttttcctctcctcatcctcattaatcttcatgacaaatgctgcaatgaacgctgacactgctgcaatcgccatgccaatcagatagtgaatcaagttgctgacgccaaacggagccgcaatggcgatcatcggaattcccgttaacccgtaagcgtttgcagctacatgtgtaaagacgacatatgccccacccaatgcgcctccgatcatcgcggcgataaacggttttcggtagcgaagattgactccgaatatgacgggctcagtaatgccgagaaaagcggaaaatgctgccggaagcgcgatttcttttgtctttgcctttttcgccataaagaagacggcaaggcctgccccgccctgtgcgacattcgccattgaccagataggcagcaagtagtttttgcctatatctgcaattaaccccgcctcaatcgcatggaagctgtgatgaacacctgtcagcacgatgagtgaatacgtgcccccgaaaatcaaacctgcaacaaaaccggcatggtcatacacataagttaaagcaaccgtaatcccggagccaagggctcttcccagagggccaatcgcgataaaagcaacaaacccggtgacaattacagtaacaaaaggtgtaacaagcaagtctaccgcatgcggaaccacttttcttgtccatttctctaccttgctcattacataaaccgccagcagaacagggatgacagttccctgatagcctagaagcgcgatatcaaatccgaaaagatgcatataatcaggtgtggcttccgccaatccccatggatttaaaagagacggatgaatcatgattcccccgatgaccgctcccaagtatggattgctgccaaactcttttgaagcgctgaccccgattagaatcggcaagaaaatgaatgctgcacttgaaaacatatcaagcagctgcaaaagcgcagaatccttgctcatccaatgaaacgcattgatcatacccagcaatcccattaataggccgctggctacaatagccgggatgattggaacaaaaatattagaaagcgttttcgcaaatctcgcagcgggattcagcttttcttttgccgcatcctgatgatttacgtgttcttcacgctcgatatcagcttctttagaaaaggcatcgaatactttattcacaaggcctgttccgaaaatgatctggtactggccagagctgctgaaagcccctttgacgccatcaagctcttctacttgtgcttgatctatctttgattcatctttcatcactaaacgcagtcttgttgcacaatgagccgcgctgataatattttctttccctccgagaagctcaatgaggcgttttgcagtctctttgtaatccatctatttctcccccttttatttaaacaaaaaagacctaaaattcgccaacgaataaaggacacagcgatcctttttcatttacgcaaattttaggtcttgcctgctttaccagtcacaatcccgcttattcagattaagaatacgctttcatcataaatcatgacagcgttttcgtcaactatttttttagttaaatagtttgataaaacatgtagacaaaaattcgtaaaaattaattgtgaaatacttcacaatatcgtgctatactatgctcaatcatgaaagaaagcaggaaaagacaatggaaactcaagcattgcaaaaggttgaacagtatgctttgaaaaaacaaaacatattcgcttcaagcaaaatccgttatgtgcttcggtccattttggccagtatgtttattggttttggcattacagccgcaagcaaaacaggcagctatttctttatggctgattctccgtttgcctttccggcagccgctgtcactttcggggccgctattctgctgattgcttacggaggcggagatttatttaccggcaacaccttttatttcacctataccgcgctccggaaaaaactcagctggcgcaacaccctgtacttgtggatgtcaagctatgccggcaatttaatcggcgccattctgtttgccatcctgatcagcgcgacgggactttttgaggagccttctgttcattcctttttgattcatttggcagagcacaaaatggagccgccggcttccgaattgtttttcagaggaatgctgtgcaattggcttgtgtgcctcgcctttttcattccaatgtctctcaaaggggaaggagcaaagctttttaccatgatgcttttcgttttctgcttctttatttccggctttgaacacagcattgccaatatgtgcacattcgccatctcgcttttgatcgagcaccctgatacagtgacactgatgggagcagtcagaaacttaatccccgttacgctcggcaatctgaccgcgggaatagttatgatgggctggatgtactacacactgaatcctgatcaataaaaaaacttccagagatcactccctgcaagtcaaagcggttattccgagagatcttgaagacgctggacatgcagcgtgatatagccggcctcggattccggcaaatgtaattgatattcatttttcaaaaactccgccagctccagcgcacattgataggcgaatgaatactttttttggatgaaataaagcatctcctcgtccatacgatggagcgcttcatttgattccaaccggctgaccgcgtatcgcaaatgcgtgacaaggcgttgataggaaatgctgttttcatccacctttcgattaaagtattgttctattttctctatcatttctttgatcatggtcgtatgcttcagcgctgaatacatgctctccgcatccatcttcgccgtatggatgtgaagggcaatataacccgcttcatcttcaggcagagacacgcccaatgtctcttttacatgtccgatcgcccacaggccgatctcgtattcttttttatagagcgcctttatctcatgcagcaatttattctgcacaagcaacccattttgaatcctttcgatcgcaaaggacaaatggtcggaaagcgcgatatgaatgtgatcgctcagcggcgccgcgagctctccttccgcatagctgatgatatcctcagctatttctacatgctcctccggcagtgtttgcaggatttgtttgaacttttcattctcgtcgcgcacgacaaagattttttccactttattcatagggatgagatcatttttctttttttgaaaagcgattcccggccccatcacgattttttcctgatcatcctcttttattaaagccgcattgttgtttaatactttatagattttcaagaggttatctctcccgccaatttgcttttgactgggattttacctccttttgaccgccatgtaaagatgcgggcccgctctctcctgctttggcgattccttgaaggcttgcaaacatcttcttttataaagcgcggcggctttcgctttctgcttttcttcctcattcacagccatccgccactcataaaacgaaacgagtcctgcggcctgcacagccgcctttctttggtatgtacgctgagccgaatagaccgcggcagccgcagtttttctgtccggcgtcacccagttcatcaaaaagaccatccacacccgtaaagatacaagcaaacgtttcatagaaaaacatccctccgcttctttttggcaggcagcctttttagcagcccgttttctcagccgcagcccgcaagaaaagacggccgatttcttttctcgcaaactagcggctctagcaaaactcatgactctatgatagaccgtggaaagagaattctttgtcacaatatgagtgaaaaaaccaactagtttttagaagttttgttgaaagctgaaagaattgaaatgaaaattggagaaccgctttgaaaactttatacacaagttatcccaaagataagaacaacttaatcacaagagatatccacatgtccacaaactctatctatattttgtatacgaacgtatattcctaactatatatatacacaggtttattcacttatacacagggttctgtgtataactccttcgttatacacaaacaaactccaataaatggtccaaatgacacaaggatttttttgaattttcaagaaatatatactagatctttcacattttttctaaatacaaagggggaaacacattgaaaaaggggatcattcgctttctgcttgtaagtttcgtcttattttttgcgttatccacaggtattacgggcgtccaggcagctccggcttcttcaaaaacgtcggctgatctggaaaaagccgaggtattcggtgatatcgacatgacgacaagcaaaaaaacaaccgttatagtggaattaaaagaaaaatccttggcagaagcgaaggaagcgggagaaagccaatcgaaaagcaagctgaaaaccgctcgcaccaaagcaaaaaataaagcaatcaaagcggtgaaaaacggaaaagtaaaccgggaatatgagcaggtattctcaggcttctctatgaagcttccagctaatgagattccaaaacttctcgcggtaaaagacgttaaggcggtgtacccgaacgtcacatataaaacagacaatatgaaggataaagacgtcacaatctccgaagacgccgtatctccgcaaatggatgacagtgcgccttatatcggagcaaacgatgcatgggatttaggctacacaggaaaaggcattaaggtggcgattattgacactggggttgaatacaatcacccagatctgaagaaaaactttggacaatataaaggatacgattttgtggacaatgattacgatccaaaagaaacaccaaccggcgatccgaggggcgaggcaactgaccatggcacacacgtagccggaactgtggctgcaaacggaacaattaaaggcgtagcgcctgatgccacacttcttgcttatcgtgtgttagggcctggcggaagcggcacaacggaaaacgtcatcgcgggcgtggaacgtgcagtgcaggacggggcagatgtgatgaacctgtctctcggaaactctttaaacaacccggactgggcgacaagcacagcgcttgactgggccatgtcagaaggcgttgtcgctgttacctcaaacggcaacagcggaccgaacggctggacagtcggatcgccgggcacatcaagagaagcgatttctgtcggtgcgactcagctgccgctcaatgaatacgccgtcactttcggctcctattcttcagcaaaagtgatgggctataacaaagaggacgacgtcaaagcgctcaataacaaagaagttgagcttgtcgaagcgggaatcggcgaagaaaaggattttcaagggaaagacctgacaggcaaagtcgccgttgtcaaacgaggtagcattgcatttgtggataaagcggataacgctaaaaaagccggtgcaatcggcatggttgtgtataacaacctctctggagaaattgaagccaatgtgccaggcatgtctgtcccaacgattaagctttcattagaagacggcgaaaaactcgtcagcgccctgaaagctggtgagacaaaaacaacattcaagttgacggtctcaaaagcgctcggtgaacaagtggctgatttctcatcacgcggccctgttatggatacgtggatgattaagcctgatatttccgcgccaggggtcaatatcgtgagcacgatcccaacacacgatcctgaccatccatacggctacggatcaaaacaaggaacaagcatggcatcgcctcatattgccggagcggttgccgttattaaacaagccaagccaaagtggagcgttgaacagattaaaaccgccatcatgaataccgctgtcactttaaaggatagcgatggggaagtatatccgcataacgctcaaggcgcaggcagcgcaagaatcatgaacgcaatcaaagcagattcgctcgtctcacctggaagctattcatacggcacgttcttgaaggaaaacggaaacgaaacgaaaaaagaaacgtttacgattgaaaatcaatcttccattagaaaatcatacacactggaatactcatttaatggcagcggcatctccacatccggcacaagccgtgttgtgattccggcacatcaaaccgggaaagccactgcaaaagtaaaggtcaatacgaagaaaacaaaagctggcacctatgaaggaacggttatcgtcagagaaggcggaaaaacggtcgctaaggtacctacattgctgattgtgaaagagcccgattatccgagagtcacatctgtctctgtcagcgaagggtctgtacaaggtacctatcaaattgaaacctaccttcctgcgggagcggaagagctagcgttcctcgtctatgacagcaaccttgatttcgcaggccaagccggcatttataaaaaccaagataaaggttaccagtactttgactgggacggcacgattaatggcggaaccaaacttccggccggagagtattacttgctcgcatatgccggaaacaaaggcaagtcaagccaggttttgaccgaagaacctttcactgttgaataagaaaaagccctgccgaatcggcagggctttttaaagatcagtcagcaaacgcctcctgcaataatcgatacgatcggagcttatcttcaaaatgatgtgtgatggtcaccaccatgatttcctctgtttcatacgctttactcaaagctagcagccgctccttaacctgttctttcgtaccgacaatcattcgatttcgattatcagcaattcgtctctgttcataaggagaatacgtatttttccgaacagcttcatacgaaggaactccctctaaaggaataccctgctctcccgccaaaagtgtaaaatcaagcacagccccaagctcctctgccttctcctccgtgtcagcacaaagaacaaaaacagcaactgccgctcgaggcgtatctcctaacacagacggtttgaatcgtctcttatactgtctgacagtaccctctccgccctctccattgataaaatgggcaaacatatagccagcgccagattcagctgcgagcagcgcgctttctccagatgagccgagcagccacacatccggagccgttgaaatatgcggcgcagccgtcagattcggaaaacggtgtttatcatccgccaaatcatgcaaatacatggtcagctccttgatttgctgcgtatactgatcagcattgcgcttaccgccgtcattcagcgcccatgatgcaatcggcattccccccggtgctctgccaagccccaggtcaattcttcctggtgtcagcccctccagaacacgaaagttttcagctactttataagcactgtaatgcggcagcatgactcctcctgatccaacacggattcgctttgttttcgccgctatatgactgattagcacctcaggactggaccctgccagccgttttgaaaagtgatgctcagaaacccaaaatctcttatatccaaggtcctcagcagcttgggcaagcgcaacggtttgctgtaaggccgtttctgcattgctgccctctgatactggagattgatctaatatacttaatgaaaccatccctaccacctcatcctcatcgtatcactgatcttctactttttctccaaagccgctcacattgcttatcagtgtcccctatcattcgccatttatttgtgaaagcctgtccctatttgtcggaatatgttacacgtgaaacataaaaacccctccagacggagaggtttgctttagtttttattaaagcccttttctttcacgtagtcatttaaatacgtacgcggcttttgcttcataaagttcagtatttgatcggaccacgtttcttcccgctgcccgtttgttctttctctatagtaatcagaaatggttttgtcatacgtattcatagtatgacggaaatcgtctgtgttcacattatacgtattctcatgataaacggcctgctttggcaatctcggttttttgccggaaaggttcgcaggatggcctactgccagtccgaaaagcgggagcacatggtcaggcgtttgcagcacctctgtcaccttgtccagttcattccgaatgccgccgatatagcaaatgccaagccccatggattcagcggcaatgctcatattttgcgctgccagcgccgcatcaatcaagctaaccataaacatttctgtattctcgagcagctcagaaatatgttcacctttttcctcagccagtttttgatggcggtacaaatccgcacaaaatacaaaaaagtgtccgttcttctcaacgtaaggctgattcccagcaagcacggacagctcacgttttttctcaggatcagaaaccccgataatcgaatatgcctgcacatagctggatgtagacgcagcctgcgcacttttcactaatgtatcaatttcttcagctgtcaaaagctgatcagtaaaagaccggattgaccgatgattcaaaatggtttcgattgtgttattcatcacaaaaacctccttatcactttttatcatatccgaaaaaaagtgatctcaaaagcgaaatgctctgcacaaaaaaagacagcctctgtaaaggctgtctgcatattaagaattaaaaagataacttctgtatttcgtcagctgcacacttgcattatatacaatcccaaatccgattaacgtggaaagtgtcgagcttcccccatagctgacaaacagcaacggaatcccggtaacaggcataatgccgatgttcattccgatattctggaatgtgtggatcacaattaacgccgtatagccaacgcaaaagaaagaagcgaaacggttaaacggatgtattttgtctatcagaacaacaagcctgtagattaaaaagaagaacatgatgacaacaattgcacagcctataaagccaaatgactcacctattatagaaaagataaagtcagtcgtactctctggaacataaaccttcaaattagaaataccattacctaaaataccaccagatcctattgccatgatggcctggtcaacttgccagctgtcatttgaatcttcctgtgtctcatttgaagcagacacccaagaagtgacccgcttaatttgataatcctgtattccaactgatttagcaacgtcaggaaagtttatcattactaataaaattaatgaaatgagtaagatacctgaaccagctatgatcgcaatcaatttccaatttatacctgacataaaaaccattacaagaacgataaacatacatattcccgcagtcccagcatcctgcatcaagataagacctacaggaataactgcgacacccgcaatctttaataacaagtggatatcatccctaagcgtccgaactcctttaggattagcttttccaataactgaagcaagcatcataatcaaaccaaccttcataaactctgacggctgtattgttattctaccgatcctaaaccaactttttgcccctttaataacaggtgcaatagactcgggactgattttaagaataatcaaagataaaataccaatgataaaaatatataaacttaacttttcaagctgttctaaatcaaagtacaaaagaactgtaatggcaacagcccccaaaaaataaaacacaatttgctgaatccaatccgtgttcccatactgcccaaactgaccggcagcataaattgatactacgcttataataaaaaacacaccaaatataaaaatcaaatccccctggtaaaaggggctttgctgtttcttatatcgactcattctatcccgccttacattttcatcggaaaatcactaatgtttattatacatgaaccacgttcaagatgacacgtgaagctcgcttccttttatgttttttcagcatttgcggcgctttttcagctacacgaaatatgacgtatcataaaccgaaatgtttcgattgacacaaaacttttcaaatgaaaaaaacgccataccaaaagaatttgttaaaaaacgaatgcgataatgtgttatattcccaaataatgtgatacctcataagaaacagctaaaaattcagagccccatgcccatacattctcctagcacattaaacgaaaaaataagacgatagatccagtccatttctgcaaaaacacgtatcaatttctggaaaacatggtataataattgtaacagaatattcaaaaaacaatcacaaaacagacacaactcagttcctctatttcatttttgtaaacgttatcacaaaatgaaaggagacgggtatgatggacatgttttttgcttacttattggttgccagcgcaacgcctctctttatttggcttgataacaaaaaagtcgcactctcagctattccgccaatcattttaatgtgggtattcttcttcttttacgcaacagaaagcctttctccacttggacacactctcatgattatcttgtttgccgttaacgtcattgtcgctcatatcgccgcatttatcatttacggccttccgtatcttcgcagaaagcgaagcagctgaagacagcaaaaaaccctcttccaatgaagagggtttttgtattattcgttatggcctgaatgctctgagtgttcagcgcctccaggaggatttccgtccatatggtcaccatggtgatagtgagccgcgaaaatccagatggatccaagtacgataacgatcgcgccaaagaatccgaacagcgtgtttccgacttggatcgtgccgttttcgctctctgtcatatgcatgaacatgagaagctgcagcgccgcctgaatgaaggcgaagccgaagataatccaaagttttgctgatgagctcaggtcagtatacactgcaacccatagagccagcagggtcaaaacgatagacaggataaaacctacaatgtgtttccatggaaagtgactgtgttcagcagatttgtttgccattttacagacccccaatcccatgagatagacacctgtaaagatgaaaatccatacaacatctaagaagtgccagtacaagcttgagataaagattttagatgaagtttgcggagttaagccgcgtttcttcaactgaatcagaattcctgtgatccagaaaatcccgattgttacgtgagttccgtgagttccaagtaaaacaaagaatccagaccagaacgcacttgtactgagagccgctccttcatgtacatagtgaacaaactcgttgatctcgcatccgacgaagccggcaccgagaagaagagtgataattgtccaaatgactacgccttttaaacttccgcggcgcatttcatgaacagcgatcccgcaggtaaagctgctgatcagcagcaagaacgtcataatcattaccagattgacttcaaatagttcgtctggcaagacacctccagctgttctgtttttaagaacgaagaaggttgcaaatagtgttgagaacaacacaatttctgcccctaaaaagatccaaaacccgagaatattaagtctgccggtttcagattgatattccataggcgcgttagaattgccgtgttctgcatgttccataactcacgcctccttattcggaaatctttctttccgtctcttttatttcatcaacactaatgtagtagccgttgtcgtattcgaatgaacgcagaaccatgcagagcaggactccgatcaatccgactacgcccatccagtaccattcaaagacaagtccaaagcctgcaagaccgaaggcaacagacataaagaacggtctgcctgagttgcttggcatatggattttcttgaatttgctttcagggtataattcagttttttcttctttcatatgcaggaatgcatcttgagatttgacttcaggaagcaccgcaaagttgtaatgcggcggaatcgcagaagaagtcgcccaatcaagcgtacgtcccacaccccatgaatctccgctgatttcacgagtagagtaacggaagctgtagtagatgttatagcaaaggattaagaatcctacacccatcatgaaagctccgactgttgagataaagttcaatgttgtccagccgtcattcggtccgtatgtgtaaatacggcgaggcatgccttgaagccccaagaaatattgcgggaagaaacaaatattgaacccgatcataaagatccagaagaaccattttccgattctttcgttcagcttgtggccgaacatttttggataccagaaaataaatccggcgaaacaagcaaatacagtacccgcgatcagcacatagtggaagtgagatacaaggaagtacgtattatggtattgataatccgctgctgccatcgcaagcataacccctgtaaccccgccgataacgaagttaggaatgaacgcaagcgcccacagcataggtgttgtaaagctgattcggcctttatacattgtaaagagccagttaaagattttaaccccggttgggattgagattgccattgtcgtaattgagaagaatgagttaacggacgcactgttccccattgtgaagaagtggtgagtccaaactaagaaactcaatacagagatggcgataatagaaccaaccatcgctttgtaaccaaacaattgttttcttgcaaagcttgagatgatttctgagaaaataccaaacgccggaagaataacgatatatacttcaggatgtccccaaatccagaacaagttagcccaaagcatcggcataccgcctgcttccaatgtgaaaaagtgagcgccgaacaaacgatcaaatgataaaagtgctaatgctactgtaagtacagggaaagcaaacacgataataaccattgtgatcagtgttgtccatgtgaacattggcatacgcattaatgtcatgccttttgttctcatttttaagattgttaccataaagttgatccctgtcatcagggtaccgataccggcaatctgaagtccgaggaggtagtagttctcacccggcccagggctcatgtcgttacttgcaagcggcatataactcgtccagcctgcgttcggagaacctccgataacgaaagaaatattgaaaagcatcgcccctacaaagaacgtccagaagctcaggttgttcaagtaagggaacgcaacgtcgcgggcaccgatttgaagaggcacaacaacgttaataagaccgattaagaacggcatcgccatgaagatgatcatgattgtaccgtgagttgtaaaaatttcattatagtggtttgagtctaaaaaactgttattcggaagcgctagctgggcacgcatcatcagaccgtcgacaccgccgcggaataacataattacagcagatataatgtacatgattccgagttttttatggtcaacagtagttatccattcagaccacagccatttccactttttgaagtaagtcagtacaaaaataatggcaatggttgaaagcgcaatggaaacttgtgcgcccagaattaatgggtcaccagttacgaaaaattcgtcccatttgaatttcatgcaggcttcctcctttcctgatcaatatcattcttctgtatcatcagacttcttaaattcgtttttctttacgttttcaaacggatctgttttagagtgcggtgaaacggcttgatagccaaggcgtttgcgcgcctccatcgcgtactcagcgtcttgtccgtgatcaacgtatttcaagtgagtagaagagaacgttaattcgtccacattttcaggaagcatcaattcatcatacttctcttttgtcagcttaggagcctcgttctgagtctttttcacccagctgttaaagtctttttctgtaactgcattcacatcaaactcttggtctgcaaaatgttcacctgtgaagttcgcgttgcggccttcgtaagtacccactttgtcagcctgtaagtattgatccatcagcattcctgccatcgcatatttttgccctccaagctgaggaatccatagcgaagccattgaatctgcagatgagattttgaacaagatcgggcggtcgacaggaatgtttaagtagttgaccgtttcaatatcctgttcagggtagctgaatacccatttccagtctaccgaagtagcataaacaacaagaggctctttatcttttgttgcttcaggagctttttctaacgaatatatcgtctgtactgttggcacagaaagtgcaatgacgattaaaattgggatcactgtccagactacttctaaaaacgtgttaccgtgaatttctgggttataagatccattatctttgcctttacggtcgcggtattttactaaaataatggtaaatagaacaaagacgaccccgacgataaacagcataaatccgatagataacaggattaaatcactttgctgttcagctacaggtcctttcggatctagtactgaagcattgctgcatcccccaaggacgaaaaccacagttaacagcgctaatacaagcaacggttttaatgctctgaacaagaagatcaccatccttcctattgatgtaataaatctgaagtgcatacttcctcaaaatcttttctctactttgttatgctatcaaaaacttcacttattagctttatttttttataaacttcatcccattttcgcttaaatgtcataaaatcgacaaaaattgctccaactttattcacatctatcgcttaagatgaaaagtttctagttatttccgcatataagtaaagaaaagatgatgaagaactaattctgacaaataaaggtttaccacaataaaaaacttaggtcaatcaaaaatttcattttgttaaactttctagataggaattattttttccttgtctagcatcttttcacacggttaccattttaacgcatcaaatattgaaagaaaaggcgcaatgaagagccaatatgctctgaattgtccgtattttttaatgagagcatccagttgtttatcttatacaaaaaagaggaatgatataagcaaataaataaaaaataggatgtgttgcatgatgagttttcttatttcacttatcgtcgctattattatcggatggcttggaagcctgtttgtaaaaggagatatgcccggaggaattatcgggtctatgatcgcaggtcttattggcgcctggatcggacacgggctgcttggaacatgggggccgcacctagccggatttgccattattccagcggtaatcggtgcagccattgttgtctttctagtaagcctgttaaccagaaaaagaggataaaagcagcagcacccgaagcgtcagcgctttgggtgtttgttttgccataaaaatcgaaaaagcctcaaccctagcggttgaggcttttgactggtttggcgcccaactggtcgataaaccttctgaaggcctgttttccttctgttgtctgtttaaacacaccggcgtgttcaaggatgcgcgcgaatacatgtcccagctcttcttttatgactagatctgcattctcttttgttatggttcttttttccatcatccgattagcccactcactatgttttgccgtgagcggattttgttctaaagctgttttcggatcagcagagcatagcgccgctgccgtttctttcatttcctcctgtaagcggcccggcaatatcgccaatcccatgacctcaatcaggccgatattttcttttttaatatggtgaacttccttatggggatgaaatatccctaatggatgctcctcatccgtccggttgttcctcagtacgatatcgagttcatacaagcctcccctgcgccgtgcaatcggtgtgaccgtattatggggcgtatcgcctgtataggcggcaatgccggctttttcatcggaatacgtctgccacgtgcggaagatatggtcagcagcttcggcgacatgacccggttcgtctccttggagcctgagcacagacatcggccacttcactaagcccagcgacacgccgggataatcgtttaattcataaacgtcttccgcttctgcacgtgccattggaaaatcatgcgcgccgccttggaaatgatcatggcttaggatgctgccgccgacaatcggcagatccgcgtttgaaccgataaaataatgcggatattggccaagaaatgacagcagcctttcaaatgtttttttgctgatctccatcggttcatgttcaccttttaagacaatgcagtgctccggataatagacatatggcgagaattgcaggaaccattgttcgtcctcaaggatgaccggaatgattctgtgattttgccgggctggatgattcacgcttccctcgaagccgacattttctttacacagcaaacacatcggataatttgtctgttcctgctcttttgcagccgcaatcgctttcgggtccttttcaggctttgataggttaatggtcatttccagctcgccatattcggtcggcaccgtccaatgaacatttttggcgattctgtcagtccgtatataatagacatcctctgaatattgatagaattcctttgtcgcctgttttgggccgtataatgcttttgtctcttcaaatttgcgaatgacctcggacggggcaggcacaaaacagcccatcagctttgcgctgagcaggtcacggtacgtatctgtatccgcttccattcggccggtttcggcagcccatttatagatgggagctagcaagtccggcaggctttgtgactgcttgatgctggtgctggagttcggctcgggatgtgtgatgcccagcgcttcataaagacggtttctcgtatattcccgatcccagatcgaaatcaattttcgttccaggccatactcaagcagctgttccagatgttcaataatactcatatgtcactccccctttagttctctcgctccctctccgatatccgcgacataaaagtccgctcggagccctgttttttcttgatatctgtctccaaccttctgaataaaatcatcaacgaactcatcttttacaatgctgatggtgcagccgccaaagcctgctcccgtcattcttgatcctattacaccttcgtgatcccatgccgcaaacacaagctcatcaagttcagggcatgttacttcatagtcatccttcaatgagaggtgggattccttcattaactgcccaatttcatctatattgttctctttgaacatatgggccgtcttaatagcacgatgattttcgtatacagcgtgctttgcccggcgtctgttcgtttcattttggatcaggctggaatgcgcatcgaaatcagaaggcttgatgtcgcccagtgcggcaatatcgaggccttttttcagatcaagcaatgcatcattgcattcttggcgtctcgtattatagctcgagtcagccaatgtcctttttttgttcgtgttcgcgatgaccagcgcgaggcctgagacattgagtttgctatattcatagtcaagcgtgtcacagttcagcagcatcgcatgatgttttttccccattccaattgcaaattggtccataattccgcaattgacgccgataaaatcgttttccgcatgctgcgccattttcacaagctcaagcgcatctacttcaggatgaaaatagctttggagcacgacccccatcagcagttcaatagaagcggaagacgacagccccgccccgtttggaatattccctgaaaatacaatgtcaaagccatagggaactgcatatcccctctgttgaaattcataaatcacgccttttgggtagttcgcccagtcgtcttctttttgatagcgaatgtcgtcaaggctgcattccttgatcccctcgtctttaaagttgtctgaatacatccgaacaagcccgtcttttctttctgcaacagcagcatatgtacccattgtcagcgcgcacggaaagacatgcccgccgttatagtctgtatgttctccaatcagattcactcttccaggtgcgaaaaaaaaccgtaatccctctttttctccgaatacacttgcaaatatcccctttagctcttcccgcatgtgcaatcacctttctggtttttattttttattccccttatttctccatagaaaacggcagatcatatgctgcagtcctctcataccccttcttcttttgtttttttaaagacgagccatttgctcgcaacatagttgacgacaacaatgaccgcgttgtcgagtattttggccaaggtttcatttgtattgaactggccgacaagaatgatcatcatgcctaaatctatgccgagagacaggacccgaacgctgaaaaaagcagtgagctctttcagcaggctctgcagatcatgtgttttttgctgaaacacatataatttatttgttatgtaagcaaacagcacggacaaaatccaagcggcgacagtggcggctttgtaatccacattcatgatctctaccaatatataaaagctggcgatattcacaatggttgtgaaaacccccataatgatatacataattatttctctatacttcactgatgttcctcgctttctgaaaaacttttcaaaattcttggcctctcgtgctctctgtctaaagtaaaaaataccgaaagtgcgtctaaaaagctgcggaaggtggctggctggcccaatacatatgattgtttgatgattccgtcgaggactgcacatattattttagccgtatattcaggatcaatacaggcgtcaatcagctttctctccttcagccacttaatatataacacattttcttccacccacaattcgtacagccggacataggccttgcatttctttaagactttatatgtcggcatgttcatggcaaacgaggtgatgtcccacgacggcttatttatgtaataggaataaagcagttctgcagcgtgttttgcagcctcgtccaatgtcagcgatttcactgactcccgctccatttgatcaagataccctataatgatcttttttttcatctgacgtttttcgagaaggtacagcagaaaatcgtccttgctgacaaaatgaacataaaatgctcctttgctgtacccggcggctctgctgatatcttctacagaaaccggatcatacgctcggtcaatcaacaaattcacgccagcgtctataaaactttcaaatgttgcttctcttttaatttgaaatttgttttttttcatatttttctcctggcggtaatgattacccttatcttacaccggatcaatctttagcggtatttatttctttgaacggttatgctattcggtttcccaggggtcatttttaataggctaaatgatttattttcatttacatactatccagtcagtatttaattgtttattattataaataaggtccattggttatattagtcatttttttagggaataggtaggtggtttttccttcagtttgtgaacaccgagcaactatgtgtgaaatttgttgtactcgcctcatcatcgcgctggcttgtcttttattgcccgcatgttgcaggaaaacattttatacaattggaggttactatgaaaactcatgttaaaaaagatttggacaaaggttggcatatgttaattcaagaagctagatccattggattaggcattcatgatgtgaggcagtttttagaatctgagacagcatcgagaaagaaaaaccacaaaaaaaccgtccggcaagactagtccgaacaggcggatctatttacctctggcttttctatcacctgatctgagttttcaccatatcctctattcaaaagcaaatcgctgcgctgagcttgaggacaaacggtgtgtcagctaactacgacagacagccggtgatgcgatcacctcttggcacatgcattgtcataaagaggtgatgcgaacatgataaccgtgctctggtaaacagcagctttgctgagaacaagctgcattcggtgaggttttgaaagcaaactcgtttatacacggccgagcttgaaaaccttcgcctgtctttagaccactgtgttcacctcttcacgacttccttcttttttcatcctccagatattgttcaacgcataaatcggactttcagtacatacctattggtgtacctttttgcttacgtttagcgaataaaaggaggaaagccatgtacaaagctgattataaacagattgctgcaacgccgtcttttcaagcttttttaaagcagaaacgcgcttttattgttccttctgcgattttcttttttgtcttttatttttcactccctgttttgacatcttatttcacctttttgaatgcaccggccattggagctgtttcatgggcttggctgttcgccatcgcccaattcgctatgacctggatactgagtactgtgtattcccggagagccgctcatttcgatcagtatgtaagcgctttaaaagagggtctgaagggtgaacagacatgaatatgactgcttttttattatttttggcgattgttggcctgacgcttattatcacgtattttgccgcgaagcggacgaaaacgacgagtgagttttatacggcgggcggcgggctcaccggcgttcagaatggactggcaattgccggtgactacatgtctgccgcctcgtttctcgggattgccggaatgattgcgttatatggatttgatggcttcttttacagcatcggttttctggtggcttatctcgttgtcttgtacatcgtggcggagccgcttcggaatcttggaaagtacacgatggcagacatgattgccgctcgctttaaagaaaagaaaatccgcggtgtcgcggctctcaataccattgccatctctactttttatatgatcgcccagctcgtgggggcgggcgcgctgatcaaactgcttctagggcttgattatactatggctgtcctcatcgtcggagtgctgatgaccatttatgtcgtgtttggcggcatgatcgcgacaagctgggttcaaattattaaagccgttttgctgatggccggcacactcgtgatttcgattatcgtgttttcgaaattcggctttagcctcaataccatgtttgaacagatgaaaacggctactccgctgggcgctgattttttgaaccccggaaataaatacaaggtgccgcttgagaccttgtcgttaaacttggcactcgtgctgggaaccgccgggcttccgcatatattgatccggttttataccgttaaggatgccaagacggcccgtacatccgttgtgtcagcgacatggattatcggtgtgttttacattatgacggtatttctcggctttggtgccgcggcatttgtcggttttgacgcgattacggcggctgatcaagcgggaaatatggcggctccgcttttagcaaaagcgctcggaggagactttctgttcgcgtttgtatcagccatcgcctttgccaccattttggctgtcgtgacagggttggtgctgtctgccgcctcagcatttgcccatgatatttacagccagatcatcagaaagggagaagcaactgaaaaagaacaaatgaaagcggccagatgggcttctgtcgccgtgtcagtgctctcgattctccttgcgatttttgcacaatccttaaatgtggcgttccttgttgcactcgcgtttgcggtagccgccagcgcaaaccttccgctgattgtgtttacagtcttctggaaacgattcaatgcctcaggcgctttatcgggcagcctgacaggcctgatcagcgcgcttgtgctggtatcgatgagccctagtgtgtgggacccggctggaggtgctatttttaccggtgatccgctcattccgctgtctaatccaggaattatttccatcccgctcggctttctcggcgcgtggctcggaacggtgctgtcgtctgataaaacaattgatgaagatacgtttgcagaaattcaggtgaaggcgcatactggcgtccatatggaacaggaataaaaaaagctctctttatagagagctttttccttgtcttttcttctgttcttcagaaatcgctttttcaaatacatccttgccggcagcacctggaattacagtgtcgccaataataaaggttggaacggctgtgatgtcagcctcttcataggcgtgcttcaaggcttggcgctgcacgtcctgatatgttcttatttccagtgctgatttgaatgatgcaccgtctaatcccacttcctcggcgagcttcgtcaagatgtcaatgtcgccgatattttggccctcctggaaaaacgcctgaaagacacgggtgttgtattcatgtcctttatggtattccttcgcaaaatggaagccttcaaacgcgaggtctgtatacggatggggcgagacgtttggaaaattgatctcgacccctaatttctccgccattggctgaattgatgtctgccacatgtactgtttggaagggtcattgaccggatcaagctgaggagatgggcttggacgcagttcaaacggcatccactcgacttcaacatcctttccttttatcgcttcttcaaaagcggcttttccaacgaaacaaaatgggcagacgtaatctgaataaactttaatgtgtactgtcatgataatctcctttcgtataaattgattttaaactgtaacaattaaagttacaactgttttttaaataaagaagccgataaggcttcttttatgattccagcaaacgctgggcaatatattctccttttttgcagccgcctgggcatgcatataaagcagaaccgattgtttgtgtatattcgtttaacgcatcctttgctgaaagagccttcagcatcgggataaactgattgtcgggatttttttgaaaactgataaacagaagacctgcatccatatagccggttttcggatcaagtccttctgtgtaagagaaagctcttcgcaaaatttgttttccagtagatttcgctagactgacgtgtgaattagacggaatttgattcagcttcacgggatctgtttcctttttctgtccgaaaggcgcccccgagctttttctgcggccgaaggtatcctcttggtccttgagggaagagcggtcccatatctcaaggaacattttgattttccgaaaagccatataggtgccgcccgtcatccagtcaggctcaccagactgaatccacacgatcgagttcatcaagctgtcatcctccgtgctctggttgcctgttccatctttgaacccgaagaggttgcgcggtgtttcaccattttttcctccgcttaaaaagcctttgttcacaaagcggacctcacaagtgccgaccgcttgatttagcaggttacgcagcgcgtgaaacgccacttgctcgtcgtctgcacacacttgaatgcagatgtccccgcctccctgcttttcatccaggttgtcattgggcatcgctggaagagcggctaggtgcttcggttttttgcttttcagcccgaaacggtcctttccgtctttttcaaaaaagccaggcccaaatccgaatgtgaccgttaagttggaaggggataaatcagcagactcacctgtatcctgcggcggcagatattgatttctctgctccgctgacattttcttgccagacgtcagcatctgtgtgagacttgtccagtttctaaataacgtaatgatgtcgcttttgtcttttgctgttacatccagtgcagcaaaatagacatacgtctgatgggcagttgtgattccggcctgatgctttccgtaaaacggaacaatctgctcctcctctttttcatcctttttcgatggcttagccgcagtctgaacaagtggagcgagaccgccgagtccgctggcaccgatcgcaacggctgcccccgccattgcccccattttaaaatgtcccgtctgtgaatttgttctgactttttttgttcatcgctcatgctgttacaaaactccttttatagcacattcgcaatcttcgacatggtttcagaaagagtcgtcagctttgtgctcagctctctgatttgcttttcacttaatttatcataagacgtataggactgatcatttgttttgtattttgccattaaaacttcaaattcgctgaactccgtatccagtttttccgtcaagtcggagtgatcttttacaagcgcgcttttcactgtttgataaacggcttcggagccttccacatttgccataaggtcgactaaatcgattcgtgagtagcgctcttcttctcccgtgattttcgaaatcccggcttcgttcagaagctccatcgcgcctgctacaatttgttcaggtgttaatttcagtgattgaattgaaccgtcaagctcttttacatccttgagaagctggtcagctgttgccttttccccggaaatatcttgatccttccaaatggccttctcaagcttatggaagcctgtccatttgtctccttcttcaacatcgttttctcgagcatcaattttcggatcaagatctccgaggctttcagcgatcggttcgattcgctcgtaataaacacgcgctttcgcatataacgttttggacttttcgatatcgccggatttcacagcacccgtaaatgcttcagtcgctttgacaagctggtcactctgctctttgacatagcctttatactcatccgctgcttttgccagctgatcgctagcctttttgccgctcttcttcgcttctgtcaggtcttctaaggacgctttcagtgactcggattctgtcttgatttttgctgtatccggtttgtctttttgcgcttctgtgtagattggctgaagatgcttttcgatttctgtatattcgaatggatagtcgctgcgaatatcgttttcaaaggaaagccagtagctgtttaactctttccccttcttttcaatctctttttggtctcctttttccgctgagtcattcagcttagaaatgatggtttccattttatttacggatgcggtgatttctttagtgatcccgcttttttcagatgaagctttttctttagttgaagatgtgtcgttggctccgcagcctgcgcacagcgcaaggatgcatccggctgatacagcgatttttgtgaaattcattttgtcagttcctttccgtttgtaaaatgttttgccgcttctgaaacaagcgcaatcagtaaaaagaggaaaatcaacatttgcggaatcgtgctgtacacagacggataaattcctagcaccgatacagacggcagccagctttctgcatcagacggaagaatgcccgccagttgaaggctgtgaacgccggttccgagaaatttcacgcacatatacaggacaaccgccattgatagaagaaaaaacggcttcaatggaatgcgcattccgagcttgatcatcagaacaccgacgatgacgagaacgataagccctgcggcagttccgccgatcagttcagtgagcgggagcttcccgacaagcccgatgaaaaagatgaccgtttcgagaccttctcttacaactgccagaaatgcaatgagcgcaaaggaaagcaggcttcgtttttttagtgcctgtgacttctggatattgattttttctctccatttatccattgaggcgtttctgtgcaaccacaccccgacatacaaaagcatgacagcggacagtacgccggtgacgccgccaagcaagaaattgttttctccgaatacactggaggagaacagaaccgtgacaccgatgccggctgctaaggaaacagccatgccggcagacgctccgccccagatccatgccgaggagcgcgtgacccgcgctttttttgtcatggttaatagtgctccgatgacaaggagggcctccatcccttcacgaatcgggatcagcgccgcatcccaccagctgtagctgcttgaagcgatcggctcgagcaattgaatcatttcgtcaatttgctttgataccttttcgggatggctgccgatctccgccttcatcagtgccagattttcctccgatgtcgtataggcttctttcgattgggacacgacgtctccctctacggcgagccaggatgtaactaaattgtcgattgcggatgacgcttcatccaattgttttttttctatgaactgttttgtgtctttcaagctttgtatataggctgttaaggacgcccttgattgacctgaggatgtctttttcagcacgacagcctgctgataggtttctaaatgagacgcaagctcttcaagctgtgttttgagcttgcctgcgtcttgattgataaaagaaagagaaatcatcgcgatattcgcgtccatttcactgtgagaagaaaggttttctttcttaatagaaggttcttcttttttccacttcgctttgaaggtttcaaacgtttgttgtgccgaatccatatccccgtcttttacggatttgatcatttgcttgtttaattgaattaatgcggcgatcggatcatcttccgcatgtgccgcagaaccgaaaaccatcaacaagctgaatagaataagtgccagcccccgagccatcatgttcctcctataattgaaaatgattatcattgtataacataatcatagccagttcttgtcctttgtcaattaaaatttgaaggtctgaaaaccttgatggacagcaaaaaagctgtccttttacagaacagccttttgaaggaagatgaacgattatctttctgttttatatgtttgaatttcctcacgaaacttgcgtgcagcactctcaggatcttccgcctgactgatggcgctgatcatactgacgccatcggcccccgcttggataacaggtgcggcattatctattgtgatgccaccgatgccgacaattggaatgctgatgccttggcggcgcactgcttcaataagagataccccttgtaccgctctcgtatcttttttcgtttcagtcggatagatcggcccaagcccgacataatcggctccgtcttcttcagcttgcttcacctcagacatcgtatgggcagaaacgccgagaatcatatcacctatggcagctcttacctctttcgcatttgcgtcttcctggccgatgtggataccgtcagctttcagcttcagagccaattccacatcatcattgacaatgaacggaataccagcttcacggcaagctgcctgcgctttttcagcaaattcaatccgagcctctcctgtcagcgcatccccgcctttttcacggaactggtacagggtggcaccgccttttaacgctttttgtacaactgtaacaggatcggctttcgtattgtttgaccccataatgaagtatacagataataactctttcatcatttcccgagaaatacgagtcatgagacagtcaccctttctatagccgcccattcttggacgtcttgttcagtaacagttgaaagcttgttcagcaattcaatctgaaagcttccagggcctttgtcagccgtctgctgtgcggcaagctgagcggcgaccccatacgaagtaatggccgcaatagcagcaaacaatggattttcttccacagcgcaaaacgcaccgacgacggaagtcagcaggcaaccggcgcctgtcacttttgtcagcagcttgtggccgttatgaagggtgtatacatgtgatgtgtcggcaatgacatcgacttcaccagtaatcgcaatgaccgtgtttagcttttgtgccgcttgctgagccagccggatgatgtcgcctccgccttcacccgcatcaacacctttgatcagccaatccgtcacaccgacggtatgggcaatttccgccgcatttcctctgattgcagcaaggcgaacctcacgaatgatgtcacgtgccgattcagttcggaacggtgttgctccggcaccgacaggatcaagaatgacgggaacgccatgttcattggctgatttccccgcgatgatcatcgcttcgactgactccttgctcagcgttccgatatttaaaacgagtgcacccgcaatcttcgccatatcggcgacctcttcttttgcgtacgccattacgggcgatgcgccgagcgcgagcaggccgtttgctgtgaaattcgttacgacattgttggttatgctatgcaccagtgggctgtgccggcggacagcagtaagacattttgctgctgattgtgcatccatgtttgcatcatcctttactatcttttttcgggtcccataaatacgatttcgtatgttcgagccaagctctggcggcaaacgacaagtaccggtcctttctccaaataatggcgaggtgccaagggatgaccggatcgacaagcggaatgactttcactttttccgggtcaaggccgcggcagatccgttccggcaaaagcccgatcccaaggtttgctgataccatctcactgataaaatcccattgtgatgtttcataaatgatatggggccggaacccagccttgatacattccgtcataattcggttgtgcaggacaaaatcctctctgaagaaaataaaaggctcgtccttcaactcacgcagctgacattctttctcatcagccagccggtgggaagggtgaacgacaagcattaaggtttcttttacgattgtaaacgaatgaaagatatcttcgtttgcgggaaggaccacaacgccgatatcaagagagccgtccccgacaccttcttggacttttatagaaccgtcttcgactagctgaaaggtgacattcggatagttttcacggaaatcgccgagcactctggggaaaaaccccgatccgatcatcggcggcagtccaatccgtacgtgccctttcttgacttccataatatcatttaattctgacgtcaggttttgaaatgatttaatgatttcctgcgcctgcacatacatgctatgaccggcatcagtcagttccacctgcctgccgtttcggtaaaacagttcaattccgagctcttcttctaaatttttgatcatttttgatatcgtcggctgagatacataaagggattgggaagccttcgtaaaactttttaaacgggcgacttccaagaaatatgttaaatggcggatatccatgtgcttcaccctttctatagacaaaaggaatacttcttattcttaatatatattttacctatagagagaccttatgtacaataagtatataagggaggcatcaatatgaaaaaactgttgctaaccgttattcaaatcgctctgttatttatatttgctcggctgattaattgggtgacagcccttcttcatataaatattcccggcagtataatagggattgtgattcttttcacattattgcactttaacattatcaagcttgaatggatcgagcttggtgcagcgtggcttctcggggagctgcttttattttttatcccgtctgccgtcggagtgattgaatacggagacattatgtcgaaatttggtgtcagcattctgcttgttgtcatcatcagcacgtttgtcgtgatggtgtctacaggaacgcttacacaactcattgcaaagagaaaggagaaaaagcatacgtgttcatcggaattgtaagtttgtttttaacggttttggtgtatttaggagcaaaaaaggtatatcaacgctttccgcgtgtttatacgtcgccgctattggtgacgcccgctgtgttagtcggtctgctgctgctggtgaatgtcccgtacgagtcctataatctcggcggcggattgctgaccgatatgctacagccggccaccgtggcattcgcgatcccgctatataaatatttccctgttttaaagaaatacgcagtggaaattattttgaatgtggccgtcggttcatgcatcgcgattatttctaccgctcttattgcgaaatggcttcacctcggcaccggcttaattgacagcctcgtcccgagatcagtgacaacgccgatcgcgatgaacgtatctgaaatgatcggcggaatgcctgccgtcacagccgtgtttgtgattttaaccgctttgctcggcacagtgatcggcccgatggtcatccgctatttccgtattgataacgaaatcgcgcggggcgtgctgctcggcacaagcgcacacggagcgggaacgtcaaaggcatttgagctcagctctgtgtccggcacgatttcaagcgtatcgatgatcttagctgcgattatgacgctttgcgcggcgccgtttttactttcatttatgtaaaaaactgtcctctcgagggcagttttttttatgtgcttccccttattgaaaagctcgcaaattacaatataatgtaatttgtggataccaaaggaggcaccctgatgcacaacttgcaggtgaggcggcattacgccgcgttaaaaggattttatttgtttgcttttctcggtacgggcagcatgattcccttactcagtatgtatttaacgaaggaacagcatttaagcggatcacaggtcggcttgatcatgtcactgggcccgattgtgatgattttctttcagccgttttggggcatgctcagcgactatacgcaaaaaacgaaaggcctgctggcggtttgcacatcaatcacaggcatcattggattagcctatattgcatttgacagtttccctctgtttattttgattgcggcctgttttgcagcctttcaaagcacgattattccactttcggacagcatttcactaaggtacacacaagaaacaaatggcaactacggcggaatccgcctgtttggttctctcggcttcggtgtcgcggtgtttgccatgggacaggtgacgaaccagctgtaccccattcacgtgatctttatctttggctgtgcctttctatgcattgctgccatattggcttcacaaatgcccggccagcagaaaacaacaacaaaagtcaatatccgcaaaggattccgggagcttatcagcaacaaaactttcctcatctttatgatcatcacctttacgacatttgctccaaacttagcgaacaatacgtatttcagtctttttctggacaaaagcggcgcgtcactttccgctatcggcattttatttttcatcggtgtcatttcagaaattccatttatgagattcgcccaaacatttatagataaaatggggctgctcaacgtcattatgctgtcaggcggagtctcattattcaggtgggcgctctatttcacggcgccttcactatggatcatttatgtgacggtctttcttcagggagtggccatcggtttatttatcccggcggcgcttcaatatgtgaaaaagattaccccaagacacgttgaagcgacagcactgaccatgtacgccgccatcggcaacgggttcggcaactggttctgcacatttgcaggcgggtatatttttgactacgtatcgattttcgcagtctacttgctttttggcattctgagcatagcaggctttggcctgacattatatttaatgaaggctgaaaaaaacaaacatacacttcatcagccggctgttacttttaaaccataatgactataatgaacaaaagaaaggatgtgcgttatgaacgggcaagagcgaaacagcatttcgaaagggttgcaggttgatattgtattgaaagcagatcaaaaaacaggaaaactgacgagagggacagtgaaggatattttgacgaaatcaagctttcatccgcatggcattaaagtccgtcttgaagatggccgcatcggccgcgtccagcagatcatttctacataaaaaaaagctgcccctgaacagggcagctttttcattattttttctgcagaaggaccactttcaggtagttgccttccggaaatgccgaaatcgttttgaaatcctccggcagcgtaaattcctcaatgatggtgtagcgttcgttcgtttctttaaaggcggcatcgataaagcctttgaatttcttcatgccaaaggcgctgctgtttgtagaggcaacaatgacacccttgtcagcagtgatggcgatcgtttccttcagcaggtttttataatccttggccgcgctgaaggtgcgtttttttgtgcgcgcaaaggaaggcggatcgagaataatcagatcaaagcgcaaatccttttttgcagcatatgaaaaatagttaaacacgtccatcactttaatgtcgtgcgcttcgtaatccagcttgttcacgctgaattgctcgatcgttttggccagacttcggtttgccacgtcgacgcttgttgttttctccgctccgccaagcgccgctgccacggagaatgcacccgtataagaaaatgtatttaaaacggttttcccttttgcatagcggtctctgatcgccttgcgcacatgtctctgatccaaaaagatgcccgtcatggcgccttcattcagatccaccgcgtattgaatgccattctcctggatgatgatcgggaactcgccccttctccctttcacgaagtcatcatcttcaacgtattgtccagccgtgtcgaagcgtttcttctcgtaaatcgctttataatcaagatccagctcatccaatgcggaaatcagcatgtctttaaaggtgtaaattcccttgctgtaccattgaatcagcaggtagccgtcataatagtcgatggtgacgccgccgacaccgtcgccctcaccgttgaacaggcggaaagctgttgtatcttgagcctcaaatagtttggcgcgcgcttgggccgcttttgttaatttggtgagaaaaaatgcctggtcaacctgttcatgtttattgcgggtaagcgtccagccgacccctttgttttgcaggccataatagccccgcgcgagaaactcgccgctctcagacacgatatcaacgaggtctccttctttcatgtgccccgcactccctgcgagagcttctttttcaataaggggatagcctttttttattttggcagcgtgtgctttttttagggtgagtagcttcatatatgtcgtcctctttctgtttgctttctcttatcgtaccacaaaacgccaagatgtctgcattgacagaaaggaaaggtttttctacgatagacaaaaagagtttcgaggaggagcagcatgccaaaacgaattgaccatacaggcatcatggtaagagatattaacgcgtccatcacattttatgaagaggtactcggcatgaaattgaaggatcgcatcacacacacgaacggtgtaatcgagcttgcttttctcggctttgaagacggcccggaaacagaaattgaactgattcaaggctacagcagcgagcttcccgctgaaggaaaagtgcaccacattgccctgctgactgatgacatcgcggctgaatatacaaaagcggaaaaaatgaacgcaaaatttatcgacgaggagatcacaacacttccaaacggataccgttatttctatatcgaaggccctgacggtgagtggattgagttctttcagcggtaaaaaaaaagaacgtacattttgtgatgtacgttctttttttatctataccaactgatatacgttgactcatcgcaaatcatagcttcccagcccatacgctcaaccaattcatggatgtttttatctttggctaaaaagacattaatgaatgagtcatatacactcataaacacaaaatccattttctcatcagttaaaacgagctctgctgcggcttcatcaagaaccgtccgcaagttggcctcagttatgtccaaaacgccgcggttttccacaatcggttctgcgtaataaaaccgattggatccgttcgcacctaatacctttaccaaactcggaatatgaaaatttgaaatatgatcctcactgggataatagaggtctccatttatgttttcatgtaacacctcagccaaatcctctctcgcgaactcgtcccttaaagcgcctatcgacgtcattaaagccagcgccagctcagcatgtgtttgaaagccgcaagaagacataaccttcttccaggaaacagccttgcctattcctcttatttcatcatcgtttggataaatatgctcgtaatcattttttctttttgcattctcccatccttcaggcatttggataaaaggagaaaagataagtgcagcagatgagtattcaactggtacttgttgtaagattggtgattcgtcatctaaccatatataatctagcatgcgcacctcctttacatattctaacattctctttcgtttaaaaggagatgatcagccctatgacaggctgatcatctatcacatcacatttttatccccagattcaaccgcactctcttcccgccatttttgatgatcccatattctgaaaaacggatagtagatggcacaggtgatcagcagattcaccagctgcataacggcgcccgacacctttccgcctgtcgccaggtaacctgatatgagcggcggcatcgtccatggcaccgcgattccggccggtcttgccaccagcccggtgctcatgccgatataagtcgcggtaatcgtgaggagcggtgcgatgataaatgggacaataaggagcggattcatgacaatcggcatgccgaaaatgatcggctcgttgatattaaatagcgcagggccgattcctaatcgtccaagctgcttcatttgtttgctccgggagcgcacaagcatcgtcaggacaagcgccaacgtcgccccgcttccgccgacattgatccaaatttgaaaaaactgagtcgtaaaaatactcggcaacgcctcgcccgcttggaaggcaagacggttggcatccatcgcgccgtaccaaatcggcgccatgattccgccaatgatggaagccccgtgaatcccgcacgaccaaagcagcatctgcacaaattcagcgatcaggcttccgccgagactgccgccaaggatggaaagcggtgtcccaagcaggtctcctacgacattgtgcagactctgaaaaggtgtcatttcaatcaaaaggcgcgccagccacacgagaaacacaatgataaagccgggaatcagcgcgacaaacgatttgcttaccgcaggcggcacaccgtctggcattttgaagacgatatttttttgaataatgtaccgatagatttcggttgaaaacaaggcaatcagcatggcgacaaataagcccttgctgccaagtagcgtgatcgggattccgccccctaccatgatggactccgttgagccatccggtgtaaacggcacctcaaacggcgttgccaatagaaatgcggcaattgaaatcgctccggccgaaagggcatcaacaccatagctttccgccagccgataggcgatcccgaaagcggcgatcatcgccataatatcaaacgaagcattgacgggatatccgagcttatcagcccactccttcccaaacacactcgccatgaaatcagcataccccggaatcggcaggctcgttaaaatcaagaagacagacccgataataatcagcggcatggtcaggataattccgtcacgcaaagcgctgaggtgccgctgtccggcaattttcccggcgacaggcattattttttcttccattacccgagtgaatgcgctcatcttaaaagcccccttttcacattgctttgtgaacaacctccgcaatgttttctttatcttattttgaaaacgtttacaaattcatttggaaaatttcctcttcctgcggaaaaaatctgcattttgccaaacaatcctgtctatgaaaaattttttccttctaactattaatctctcttttttctccgatatatatatcaaacatcatagaaaaaggagatgaatcatgaaaaacatgtcttgcaaacttgttgtatcagtcactctgtttttcagttttctcgccataggccctctcgctcatgcgcaaaacagcagcgagaaagaggttattgtggtttataaaaacaaggccggaaaggaaaccatcctggatagtgatgctgatgttgaacagcagtataagcatcttcccgcggtagcggtcacagcagaccaggagacagtaaaagaattaaagcaggatcctgatattttgtatgtagaaaacaacgtatcatttaccgcagcagacagcacggatttcaaagtgctgtcagacggcactgacacctctgacaactttgagcaatggaaccttgagcccattcaggtgaaacaggcttggaaggcaggactgacaggaaaaaatatcaaaattgccgtcattgacagcgggatctccccccacgatgacctgtcgattgccggcgggtattcagctgtcagttatacctcttcttacaaagatgataacggccacggaacacatgtcgcagggattatcggagccaagcataacggctacggaattgacggcatcgcaccggaagcacaaatatacgcggttaaagcgcttgatcagaacggctcggggatcttcaaagtcttctccaaggaattgactggtcgatcgcaaacgggatggacatcgtcaatatgagccttggcacgacgtcagacagcaaaatccttcatgaggccgtgaacaaagcatatgaacaaggtgttctgcttgttgccgcaagcggtaacgacggaaacggcaagccagtgaattatccggcggcatacagcagtgtcgttgctgtttcagcaacaaacgaaaagaatcagcttgcctccttctcaacaactggagatgaagttgaattttcagcgccggggacaaacatcacaagcacttacttaaaccagtattatgcaacaggaagcggaacatcccaagcgacaccgcacgccgctgccatgtttgctttgttaaaacagcgtgatcctgccgagacaaacgtccagcttcgcgaggaaatgcggagaaatatcgttgatcttggtaccgcaggccgcgatcagcaatttggctacggcttaatccaatataaagcacaggtaacagattcagcgtacgcggcagcagagcaagcggtgaaaaaagcggaacaaacaaaagcacaaaccgaaatcaacaaagcgcgagaactcatcagccagctgccgggctccgacgccaaaactgccctgcaaaaaagactggataaagtacagtcatacagaaatgtaaaagatgcgaaagacaaagtcgcaaaggcagaaaaatataaaacacagcaaaccgttgatacagcacaaactgccatcaacaagctgccaaacggaacagacaaaaagaaccttcaaaaacgcttagaccaagtaaaacgctacatcgcgtcaaagcaagcgaaagacaaagttgcgaaagcggaaaaaagcaaaaagaaaacagatgtggacagcgcacaatcagcaattggcaagctgcctgcaagttcagaaaaaacgtccctgcaaaaacgccttaacaaagtgaagagcaccaatttgaagacggcacagcaatccgtatctgcggctgaaaagaaatcaactgatgcaaatgcggcaaaagcacaatcagccgtcaatcagcttcaagcaggcaaggacaaaacggcattgcaaaaacgattagacaaggtgaagaaaaaggtggcggcggctgaagcaaaaaaagtcgaaactgccaaggcaaaagtgaagaaagcggaaaaagacaaaacaaagaaatcaaagacatccgctcagtctgcagtgaatcaattaaaagcatcccatgaaaaaacaaagctgcaaaaacggctgaacgccgtcaaaccgaaaaagtaaccaaaaacctttaagacttgcattccaggtcttaaaggttttttacattctaagaacatcgtacacaacctttttcccatccgcctcacaggcttttcatactattgctatacagccatgaacagcataaaatgaacgttattacagttatcaccacatatggcgggattgtgactgggcaggcaggcaagacccaatgatgcaaagggagtattaatgcctaaaaagcagggcattttaactcttcttttcgtgttgggctcataacggcgccttggacaaccccctattctcatgctccgtcgtcgcgtcgacgcgggcatttttgtcattttcagccgatatttctcacttttttcattttgattgtcaacttttcatttgatacgatgaacaagccgacttttcttcagcaaaggaggttttgattgcttgcataaagagattgcaaaagaattactgctgctcgcaggaggaaaaaacaatattatcagcatcagccattgtacgacccgtcttcgttttgatgtaaaggacgagacgaaaattgatatacatgccattgagaacctgcaaggtgtgcagggcacctttttccgttatgggcttttccagattatcttcggagcaggcgtcgtcaacaaaatatataaagaagtcgttcatgtatgggagaacgcgccttctgaagaacctgtccaccagaaaaaagccagccggaagctgaaccctgccgcagcttttgcgaaaacactgtccgatatttttgtgccgattattccggcaataacagcaagcggcctgctcatggggctgatcggcatgattaaggtgtttcactggttcgctgccggcagcccatggattaaaatgctcgacctcgtgtccagcacagcctttattttactgccgattttagtcggcttcagtgccgcacggcaatttggcagcaacccatacctaggggcagtgatcgcggggcttttgacgcatcctgatctgctggacccgtctatgctcggcagcaaaaccccgtcttctttagacatatgggggcttcatatcccaatgatgggctatcagggttccatgataccgattcttctttccgtttttgtcatgagcaaaattgagaagctattaaaatcgattgtgccgaagtcgcttgatgtcgtgatcattccctttattacggtcatggtgacaggatgcctcgcgctgattgtgatgaatcccgccgcgtccatcatcggccagatcatgacacaatcgatcgtctatatttatgatcacgccggcattgccgccggagctcttttcggcggcatctactccaccatcgtcctatctggattgcatcatagcttttatgcaattgaggcaacgctgcttgctaatccgcatgtcggtgtcaactttttagtgccgatatggtcgatggcgaatgtggcccaaggcggagcggggcttgcggtattcctcaaaacgaaacaatcaagcctgaaaaaaattgcgctccccgcttctctgaccgcgtttttaggcattgttgagccgattgtattcggggtaaatctcaaattgatccgtccctttatcggagcagccatcggcggtgctattggcggagcatacgtggttgcggtacaagttgtggcaaattcctacgggctgacaggcattccgatgatttcaatcgtgctgccgtttggcgccgctaattttgttcattatatgatcggtttcttgatcgcagccgtctctgcttttatagctacattgtttctcgggtttaaagaagagacagaataactggatttattcgttttcattcataaaacgggggatgaaaggacaaaaaagctatgaaaattaaaagaatcttaaatcataatgctatcgtcgtaaaggatcaaaatgaagagaagattctcttgggtgcaggaattgcgtttaacaaaaagaagaatgatattgtcgatccgtcaaaaatagaaaaaacctttatcagaaaagatacacctgactataagcagttcgaagagattttagaaacattgcctgaagaccacattcagatttctgagcaaattatctctcatgccgaaaaagagctgaacatcaaaatcaacgagcgcattcatgtcgctttttcagaccatctttcttttgcgattgaacgcctgagcaatgggatggttatcaaaaatccgctgctgaatgaaatcaaagtcctttatccaaaggagttccagatcggcttatgggccagaacactgattaaagataaactggggattcacattcctgatgatgaaatcggcaatatcgccatgcatatccacacagcaagaaacaatgccggcgatatgacacaaacgcttgatattacaacaatgatccgtgatattatcgagattatcgaaattcaactgtctattaatatcgttgaagataccatctcttatgaacggctcgtgacccatctccgctttgccattcagcatatcaaagcaggcgaatccatttacgagttggacgcagaaatgatcgacatcattaaagagaagtttaaggatgccttcctgtgtgccctaagcatcggcacctttgtgaagaaggaatacggctttgagtttcctgaaaaagaattgtgctacatcgccatgcatattcagcggttctaccaacggtcagtcgcacgctgagacaaacaaaaaacgcttttgatcatctcaaaagcgtttttttatatctgtattattggttgatcgccgggttgctgatcgtattccacttcgtataggacatgtaatggaaatactcatcgcgatacggatgttttgtattggagttccaaggcttttctccgccgcagaagtgcacgattgccgggttttctctcgtttcattatattgcttccgccctaacagagtcgatggggttttcagctttaacatgatataggtttgagcgttccagcgcggatgaagttcataccactgatcatataaaatcgcattcagtgcatcttggtcatgcagcacaagaaagtcttcgtctgggtgttcattgataaagttgatgactttttctgtgatgttttgctttctccaagactcaaaatcaataatcatgatacctgagttaaaatacttccctgtatcagtgacgttcatttctttcaggcgttcatgctgccccgcatcctcaacagcggctacggtgtatggcgcaatgtctaagtcccatagcttagaaatatcctctaggacaagcgcatcacaatcgatgtaaatcattcgtttgatgctttcatccttaattaagtcgggaatcgaaatgcggtaatacgcggcttttgtaatatggctgctctctaccgcatgttcatacattttggtatccacttctaaaaactcaatcggcactccgaatttcaaagtggtttcttccagtctttttttgttatcaggcttaattccgccatcaatgacgtataattttacctctctctcctgatccatgttagtcaataaagaaacgaacatcccacctaaatgacgagcataattatcatctgcgcatgatacgatatgcatgatttcatctttcctcaatggtattcatctccctttttgttgtacaagttacataccctttttcaaaaaaataaacacgttctccgacatttttttaaacagaatgtgtgatacaacaaaaaaggtgtcattttttgaagatgcgataaagccagtaaagaatgaaaaagcttgcgattgtgatggcttcagccgagacgatataccacggccatggcccgagaacatctaagagagaggatccgcccggttttttcgtcaaatacatataattcgcgccaagccagcgatcaatcaggaaaatacagacgccgtacacattaacaagcaggactgtcacccataacgagcgctggcccattctgtaggtgccaatcacagccatcagcagacaggataaaaacacagacccgtgagaaataaaaaagaggatatatcggatatgcggaaatgaaaacattccgaggtcaggagtggcaagagcctgaatcgaactgccgatgccgacaaaaaacaaaaacacaaacagctttctgctttttgtcactaacataatagctgacaaatacaccgacaggtcactaagctggagaggcaatgaagtgcgcaccgaccacctgcccgtggcgaccaaccatatttgatagccgatttgcgaaccaagcaaaagaaacacaaacagagaacgcaaaaaccggctggccctcggctgcttgaccccctcttggaacaaaaccaacagaatggccaaaagggcgataatcgctaacgtcactacatgctctgtcgaaaacagatgaaacggatcatgcttatagacggattgaacatatttttgcaaaactgcacccccgtttgcggttttttgtttattttggcgttgtttgggctttttttattcaaccgatatatgggcttgaagttcacatcatcctctgttacaattcgtttcatagctaatgattctgataatttaaggcaggtctaaaaaatggaacgttcacatcaacatcagcagcttcggaaggaagaacacgatacactttctaagctcaaacaaatgcccgtcgagtcactcaacctggaagccatttcgatcgctacgaatctgtatcggtctgcacaaaggctccgtgtcaaaatggagactgaggttctttcttcctataacctttcttggaccgctttctccattctttatgatctatgggtatggggagcgctcgaaacgagaaaaatcgctgagctgtcagggatatctacagctacagcaagcaacgtgatcaaaacgctcgaaaaaaagagtttttgccgtaaaagcatcgacacaagagatcggcgactcgtgtttgtctcaatcaccgattccggcaaacaagcgatcgaagaactctacccggagtttcacaaaggggaaacagagctcattgcgggaatgacgaaggacgaacagaaaatattgacagggctgcttagaaaggtagctgacaatcttcatacaacataagctttgacgggaatccagtagcggtttgtctccctgtttcagagagccggcggaaggtgcgagccggcacacagcaaacgtgaattacctccccgagctttctttgtgaccttaaaagtagcaaagaacgggaaaccgttattcgaatgagcggaagacgatgtcttcaaccagggtggtaccgcgtgcattgagccacgtcccttatcgggatgggctcttttttgtgtttgtaaaaaaggaggaaaaatgatgaaaacatttgagcagctcacagcgtcacagcaaaaagaggtagaaagacagcttcagctatacatgacaggcgcccacgaagtcataccgccggaggaattaaaggcaaagctcgtgaaatcaatttccacgggcacgccgcttaaaattaagctcggattagatccgtctgcaccggatgtacatttgggccatacggttgtgttaaataagcttcgccaatttcaagaaaacggccacattgtccagctgttaattggggatttcacaggaaaaattggtgatccgaccggaaaatcggcagccagaaagcaactgactgatgaagaagttcagcacaatgccaaaacctactttgagcaattcggaaaagtgcttgatccagaaaaagtcgagcttcactataactcaaaatggctgaaaacattgaatctggaagatgtcattgaattagcagggaaaataacggtagcccgcctgatggagcgcgacgactttgaagaacgcatcgccatgcaaaaaccaatctcactgcatgaattcttttacccattgatgcagggatatgattctgtcgttctcgaaagtgatattgaattaggcggaacggatcagcatttcaatgttctcatgggacggcatttccaagaacgatacaacaaagaaaaacaagtcgtcatccttatgccgctcttggaaggcttggatggcgtcgagaaaatgtcgaagtcgaaacacaactacattggcattaacgaacatccaaacgacatgtacggaaaaacgatgtcactgcccgacagcctgatgaaaaaatacatccacttggcgacagacttagagcttgaagaaaaaaaacagctcgtaaaagacttagaaaccggcgcagttcatccgcgtgatgccaaaatgcttttagccaaaacaatcgtccgaatgtatcacggagagaaagcagcagaagctgccgaacactcgtttaaaacagtctttcaggaaaacagcctgccggaagatataccggccataaactggaaaggtgaaaaaacgatagcgatgattgatctgctcgtcaagctaaagctcctctcttcgaagagcgaggcgcgccgcatgattcaaaacggcggtgtacgcatcgacggagagaaagtaacagatgttcacgccaaagcagagataagagagaatatgatcatccaagtcggcaaacgcaagtttttaaagctccaatagtctgatattccgaaacgcttatgacccttcattcataagcgtttttttgcaggtataaagcagtcttttcaaaaacgctctccatcttgcaggaaactcctttagcatcccgaaatattccccaaccatacatttaggggaggtttatttttgatgaaaaagcttttgactgtcatgacgatggctgttttaactgccggcacactgctcttgccggcacagagtgtcacccctgccgcgcacgctgtacaaatatcaaatagcgagcgcgagcttccattcaaagcaaagcatgcgtactctaccatttctcagctaagtgaagcaatcggccccagaatagccggaactgcagctgaaaaaaagagtgccctattgatcgcctcatcaatgagaaaattaaagcttgatgtgaaggttcaacgattcaacattcctgaccggcttgagggaacactgtcttcagcaggacgcgatattcttctccaagcggcatccggctcagctccgactgaagagaaaggactgacggccccgctttacaatgcgggattgggctatcaaaaggactttaccgctgacgtcaagggcaaaatcgccttgatttccagaggagacctgacttattacgagaaagccaaaaatgccgaagccgccggagcgaaagctgtcatcatttataacaacaaagaaagcctcgtgcctatgacgccaaacctgtcgggaaataaagtcggtattccggtcgtcggcattatgaaagaagacggcgaagcacttacccagcaaaaagaagccaccttaaaactaaaagcattcacaaaccaaacctcccagaatatcatcggaatcaaaaaaccaaagaacatcaaacatccagacattgtgtacgtgacggcccattacgacagtgttcctttttcgcccggagcaaatgacaacggctcaggtacctctgttatgctggagatggcgcgtgtcttaaaaagcgttccatctgataaagaaatccgctttatcgctttcggcgccgaagagctcggcctgctcggctcctctcactatgtagatcatctatcggaaaaagagctgaaacgaagtgaagtgaacttcaacttagacatggtaggcacaagctgggaaaaagcgtctgagctgtatgtcaacacattggatggccaatctaactatgtttgggaatccagtcatacggctgctgaaaaaattggatttgacagcctgtctctgacacagggaggatcatctgatcatgtgccattccacgaagccggcattgattccgccaactttatttggggagacccggaaacagaagaagttgagccgtggtatcatacccctgaagactcgatcgaacatatcagcaaagaacgcctccagcaagcaggcgatcttgtgacagccgctgtctatgaggctgtgaaaaaagagaagaaaccgaaaaccattaagaaacaaatgaaggcgaaagcatctgacatttttgaagatatcaaataaaaaaagacggcacttgggtgccgtcttttttttataatgatcagctgtttagccgtctataagtaaagctttcagtttatcaactgtattttctttttctaacgggcgataaatggtcagtttcaaatcaggagagtcatatatttgtaatgtcatatgctccatcaccattgttccggctgccgggtgatgaagtactttttctcctgcgtgtgtgcctaatacttcgtggtggttccaccattttttaaattccgggcttctttcagttaactcatcgatcagctcttttatccatgcttccccaagaaaccggctggctgtcgatcgaaactgtgcgataagttttttggcgtggctttcccagtcgtcaagcagatcccgatactccttcgaggtgaaacatcgccatatggcattcctttccttactgcccatttggccaaaattgccgaacacagcacaagctgctgtgttccaagcaataacgtcccacttttcgtcagtcacataaacagggcaattggttaaatgatcaataaagtgccgcacagccagaggaaggctcttattatcttcatcctgatcatctaaaggaacatgatggccagccaacagaaagacatgacgcttttcctcataattcaatttgagcactctcgatatgctttccagtacctgtgttgatacccgaatatcccttccctgctccagccatgtgtaccatgtgacacctataccggacagctgggctaattcctctcttctcaagcctgttgttttccttctggtacccataggcaatccaaactcttgcggagaaagctgtgcccttttcagttttaaaaactcccctagctctttccgtttttctgccatactgtccacatacacactctccttttgcatagaatttcctattagtattctacataaaaaggagaaggtttttatattatttgtttcgttctccaaatacttcagcggccacaggaagaatggtattcagtgcattcggaaaacctgagtaaataatcatctgcatcatgacttctatgagttcttcttgtgtccatccgacattcagggctccgttaatatagaattttagctgctgggtattgcccaatgcagtcaatccagcaacggttgctaataatctggatttcagatcaagacctggtcttgaaaaaatctgaccgtagttaaactccacggcaagcacaccaaggtccggagcgatggaatgtttaaaattgtccacgatcgcttcatagttctcctcatcaatttgtttcagaatatctaacccttttttataacgttcacttgttcgcatcagcttctatctcccttccaatatcgcttttttagtagtacggtttatggtaatccttgaactgaaggcaataccgaccatgatcatccccaggatacaaacaccgttccaatgaaacagcatccagaccgcaccccctgcatacgatcccaaggcgccgcctaaaaacgtgctgaccataaagaggccattcaatctgctcctcatttcagccgacaattggaaaatctccgcctgacacgccacctgattcgcctgaatgcccatggtgatgaataaagcgcccaatacaatcacaatcaatgaagtctggcctgccattaataaaacaaatgacaataaggtaaaagacatacaaagcttgttggaaaaagcagctcctttttgatcaataatccggccgatcagcggagttgcaaaagccccgccaattcccaccaaaccgattgttccggcagtctggctgccaaacgagaatggaggttcactcaccataaacactaacgtcgtccaaaataaactgaaggcgccgaacatgaagccttggtttacacatgcttttcttaacactttctccttgatcaaaagcggaaataatgaagaaatgagttttccgtaatgaaatgcatgtgtccctttgcttttcggaaagcagaagtgaatgatcaacataatgatgacggctgctgcacaggcaatccaatacatcacgcgccagccataatgggcatctatcgccccgctgaccactctcgcccctaaaattccgcaaaccaagccgatagctacgtttccgagtacttttcctctgttcctgtcatttgctaaacctgccgcaaacggcacaaggatttgaggaataatcgtgaagaatcccaataataaatttgtgatgactagccatggaaagcttacagctaacgctgaagctgccgaacaaacccccactaagaatagcaggctcacaattaagcggcggcgttcaaaaagatctcccaatggaacaagcagaaggttccccgccgcatagccaatctgcgccaatgtagcaatcattccagcttgtgccggcgtcatatgaaacgtgcctgccatgctgacaagcaatgtttgattgatatagacattggctaccgtaaacccgctagtcaccgcgataagaaaaatcaaacctctcgataatgaaatggaatggttcatgtttacctcctttcttcatgcatgataaagcaggttcaatcatggaaacagaagtgagtttatactggtataaaaagtactagcaagcaaagcaaaaaagcgaaaccctgtcaggcttcgcttttgttatcaatccacttctttcttaatccccagcattttctcatctaggtaatgggcaatctccgcggcttccttcagctcatctgttaattgcttaggaacgtcattgttcaatttatagtaaattttatgttcaaggctcgcccagaaatccatcgcgattgtccggatttgaatttctgctttgacgtattccacacggttcgttaaattcacaggcatctcaatgattaaatgcaggcttcgatagccattcggtttgggtgtctggatataatcctttacctttacgattctcaaatcttcatgctgcttcaacacattcacgacattataaatgtcagaaataaaggaacagatgatgcgcacgccggcaatgtcgtgaatatgctccttcatttccttcgtcgtaatctcacagccctttctcattaacttattcacgatgctttcaaagcttttgacacgggattttgtatgttcaatcgggttgtgtccgtgaatgaggttatattcctggctgataattgagaactttgtatcgagcgcatctagcgcaaatttataaactaataattcatttttccaatcttccattactgtttttaaatcgtccatatgtgttacagataaatccattttcgtcatctcctttaacggaactttatccgctgtccatgtactagacgtccctgtctgctgcaaggttctatgaatttttttacaaaatgcggtcgattgtaacaaaaaaagaccgcacgaaacgagcggtcttttttattatcggaaatagctgatcaataatccgatcgagagcaggaatccgaaaaatgtatttgtttgggctgttgatttcattgcgacaatcatattcatcggcatttcgttctggacgaaacccttcactgcctgaaccggcttaggcacgctcaaaaagacgacaaacagccatgggcttgcggcaccggtaataaccaagccgacaacccagatataagcgacggcaaacgacgcagctaacagagtaacagctcccttatgccccatcaaaatcgccaatgttttgcgtccgccttttttgtcctcttcaatatcacgaatgttgttcgacaggttaatcgcgccgacaagaatcgcaatcgggatggaaatcaaaatgctttgcgtgttgatcatatctgtctgaatgaaaaacgaaatcagcacaaacaccgaacccatgcaaatgcctgagaataattcaccgaacggcgtgtacgcaatcggcagcggcccgcctgtatacaggtagccgatcgccatgccgacaaggccgatcagtgcaagccaccagctgctgcttgcacaaatatagacaccgagcaaaatggcaatcccgtatgaggcaagagctaattgcaaaatcgttttaggcttcattccgtggcgtacaattgcccctccgattccgactgattctgctgtatctaatccgcgtttaaaatcatagtattcattaaataagttcgtcgcgatctggatccataggcaagaaaacagcatagccaaaaacagcagcagatcaaccttcacataaaacatcgccaaaacggttccgagcagcacaggcacaaacgatgcggttaacgtatgaggacgggttaactgccaaaggatctgccccatgctttctttttgcggcgctgtctgaccctcacccttatttgtttggttcatcttcctcttcctttctattaaaaggcttactttttttcagccggcagcttaataaaaaactccttttgcttccttatctatcataatgacttctcccttatttcacaagataccgcaagaaggcgttttctttcttattatacgcttctcgccctgatttcattaggtttctgctttcacttgaacgaacaggtacagaaaaatttttttaagtacattacactttttaaaagttaaaaagatcttttgactccagctatcttttcctttattatgaatcagctcgaaacattccattcttgcccttgcaggtataaagattcattttcaaaaacatacgccgatatattaatttgagggagattagggaaaaaatgaaactttttgagcatctgatcgtcaaataatcatgtgattgtcgaaaaaacgggaagggaatttttgatatgctgcaattaatgaaacagctgtatgaaaaacccgctgtcaagtggacatgtcatacaggcttttatttgatgatactgcttgttttgttttttatgtatggttttcacaccgcgaataccggttcatatatttataacgatttctaattggagagagaataactatgaaacttttacatgctattcaaacacatgcggaaacttatccgcaaaccgatgccttccgctctcaaggccagtcgctcacgtatcaggaattatgggagcagtctgaccgcgcggctgccgcgatccaaaaacgcatttctggggaaaagaaatctcctatccttgtgtacggccacatggagccgcacatgcttgtttccttcttgggaagtgtcaaagcgggacatccttatattccggttgacctgtccattccgtccgaacggattgcgaaaattatcgaaagctctggagcagaattgctgatccatgcagcaggactctcaattgatgcagtcggccagcagattcagacagtttctgcggaagaactgctggaaaacgaaggcggctctgtcagccaagatcaatgggtcaaagaacacgaaacgttttatatcatttacacttccggaagcacaggaaatccgaaaggcgtgcagatttccgctgcgaaccttcaaagcttcacagactggatttgtgcagactttccagtcagcggaggaaaaatatttttaaaccaagcaccgttctcatttgatttgtctgtcatggacctatatccgtgccttcaatcaggcgggactttacattgcgtgacaaaggatgctgtgaacaagccgaaagtcttatttgaagagctgaagaagtccgggctgaatgtgtggacatcaacaccttcctttgtgcaaatgtgcctgatggatccaggtttttcacaggatctgctgcctcatgcggacacatttatgttttgcggagaggttcttccggtttctgtggcaaaagcgctgcttgagcgttttccgaaagcgaagatttttaatacgtacggcccgactgaagcgacagtggctgtcacatcggttgaaattacggctgacgtcatcagccgcagcgaatcgcttccagtgggcttcgccaaaccagatatgaacattttcattatggatgaacagggacagccgcttcctgatggagaaaaaggagaaatcgtcattgcagggccgagtgtaagccgaggctaccttggtgagccagagctgacggaaaaagcgtttttctctcatgaaggccagtgggcataccgaactggcgatgccggctttattcaagacggtcagattttctgccaaggacgtttggattttcagattaaacttcacggctatcggatggagctggaggaaatcgagttccatgtcagacagtcacagtacgttcgctctgctgtcgtgattccttatcagccaaacggaacagttgagtacctgatcgctgctattgtgcctgaggagcatgagttcgagaaggaattccagctgacaagcgctattaaaaaagagcttgccgcttctcttccggcatatatgatcccgagaaaatttatctatcaggatcacattcaaatgacggctaacggcaaaattgaccgaaaacgcattggcgaagaggttcttgtatgacgccttacagctcgtttttattctttatactgcttggcattcttcttctgccgacgatcattctcggcttaaacggaaaaagatttcaagcatacaacatgttcatatctatcattatattggctttaattttttcgcatgacttacacggggtcatcgcgctgtgcctgtttacaatatggcaggtgctcctgatcagcggctatctggcataccggcagaaagcgaacagcggctttgtcttttgcggggctgttatcgcgtctattctgcctttatttctgtcaaaaatatggccgtttctttcacacccgcagccgcatcatccgccgcataacctgatcagctttttagggatttcatatttaacctttaaaggcgttcagctgattatggaagcaagagacggactgctgaaagaacagctgccattgcaccgcctgctgtatttcatcctgtttttcccgacgatttcctccggcccgatcgacagataccgccggttcgtcaaggatgaacagaaggcttggacgaaagaagaatacgccgacctgttgtatacgggaatccataaaatcttcatcggtttcctgtataaatttattatcggctacgcgatcaatacgtacttcatcatgaatcttcccgcaatcacgcacaataagattcttgggaacctgctgtacatgtacggctacagcatgtatttattctttgatttcgccggctacacgatgtttgccgtcggggtcagctacattatgggcattaaatcaccagaaaactttaataaaccatttatcagtaaaaatattaaagatttctggaatcgctggcatatgtctctgtcattttggttcagagattatgtgtttatgagattcgtattttggatgactaagaaaaagtggatcaaaaaccgtatggccgtctcaaacatcgggtatttcctgctgtttatgctgatgggggtttggcacgggctcgcgccgcaatatatcatttacggcctctatcacgccgtgctgatgacgtgttacaactttttcgagaagtggaataagaaatataaatggctgccgtccaaccgctggacaaccattctcgctattgtgatcacattccatttcgtttgcttcgggttttacattttctcaggaaaaccatttcatcaccaccattaaaggagattagaaagctatggattttaaacaagaggtattagacgttttagcagaggtttgccaggatgacatcgtaaaggaaaatcctgatattgaaatttttgaagaaggtttgcttgattcttttggaacagtagaattgctgcttgcgattgaaaaccgttttggtattttagtgccgatcactgaatttgaccgggacgtttggaatacacctaacaacattgtaaatcagctgtctgagttgaaataatgaaaaagcgttttttcggtccaattattttggcgtttattctattcgcaggcgccatcgcaattccatcttcatggctgacaggcttcatcaccgataagcgtgtgaaagagtcagcaacagccttgaatccgagtatgtttcaagggctatatttacaagatcagatgctcaaagatccgacatatcttccgatttacgggtcttctgagctttctcggctggacgagttccacccatctaattattttcaggtaaacaatgagggattcacgccataccttgtcggcaaaggcggatcccagtcattgattcattctttaaacttcgctgcccatatggatcagctgaagggcaaaaaaatcgtattcatcgtgtctccgcaatggtttattaagcgcgggtctgatgaacagcatttcgcgccgaactattctgcgctgcaagggcttgatttggcatttaacgatcagatcgatcctgaaattaaaaagaaaatgatgaaacgcatgctgcgctttaaggctgtgcaaaacgatgccattctttctgagctgtacaaagcaatggtaaacggccagacgtggaaagtgaacgcgctgaagccggcggcgaaagtgtattacagcatgctggaaaagaaagatctgtattattcaacgacagaatcatccgggccaaagcgctatatctcgcagtcagtaaaggataagtcatggtctgaattgaataaactggcggatcaatcgggcaaacgccactccggttctaacgattttcacatcgacaaccctgtctataaaaagctgaagccgaaagtgcctaagctgaaagggaaaaacaaaggaagatcgtatgcggtgtcaccggaatatggcgactttgaaatgatgctcgatatcctgaaggatgcgggcgcagagcctatgtttgtcaccattcctgttaacgggaaatggtacgattacacgggcttcccgaaaaaaggacgcactgactattacaaaaaggtaaataaacaaatcagagcgaagggcttccaggttgctgatttctcagggcatgaatatgacccgtatttcatgaaagacaccattcacatcggctggaaaggctgggtgtatgtcgataaagcaattgacgaattttataaaaccggaaaagtcacttcatcctgagcatctcataggacgcggctgcatatttcctgctaagatttgaaatagtaaagaaatcacagccaacttaattaagaggtgttacatccaatgaagatgacaggcaatacggttttaatcacagggggttctgctggcatcgggcttgaactggccaagcgcctgctggaacttggcaatgaagttatcatttgcggacgcagcgaagcacgtcttgcagaagcgaagcagcagctcccaaacatccatacaaagcaatgtgatgttgcagaccgttcgcagcgggaagcattgtatgaatgggctttaaaggaatatccgaacttgaatgttctcgtcaacaacgccggcattcaaaaggaaattgactttaaaaaagggacagaggatctttttgtggacggtgatgaaattgaacttaatttccaagcgcctgtccatttatccgcccttttcacacctcatttgatgaagcagcctgaagcggcaatcgttcaggtcacatccgggcttgcgtttaacccgttagctgtttatccggtgtactgcgcaacaaaagcggcacttcactcgttctcgcttacgctcagacaccagctccgcgacacgagcgtggaagtgattgaaatggcaccgcctatggtggacacgggcttaaaccaaaaatcacgcgataaacaaggcctgacgtaccggggcatttcatctgaagaatatgttcaatatttcttggacggcttgaaggaaggcaaacaggagattacaaatgaacgggttgaaggtcttcgggatgccactcgcgccgattatgacaggttattcaagcaaatgaacacgcaggagaattaatttctcctgcttttttcatatgaatttcttacaaatttgagcaaacctattgcgattatttgttgaaggtatacaatagaatataattattttcaaataagtttgataatataaacaatttaacagcagggagattgaccatgactaaacaaacaattcgcgttgaattgacatcaacaaaaaaaccgaaaccagacccaaatcagctttcgttcggaagagtgtttacagaccacatgtttgtaatggactatgccgcagataaaggttggtacgatccaagaatcattccttatcagcccttatcaatggatccggccgcaatggtctatcactacggccaaaccgtgtttgaagggttaaaggcttacgtgtcagaggatgaccatgttctgcttttcagaccggaaaaaaatatggaacgcttgaatcaatcaaacgaccgcctctgcatcccgcaaattgatgaagaacaggttcttgaaggcttaaagcagcttgtcgcaattgataaagactggattccaaatgcggagggcacgtccctatacatccgtccgttcatcatcgcaaccgagcctttccttggtgttgcggcatctcatacgtataagctcttgatcattctttctccggtcggctcttattacaaagaaggcattaagccggtcaaaatcgctgttgaaagtgaatttgtccgtgcggtaaaaggcggaacaggaaatgccaaaaccgcaggaaactatgcttcaagcttaaaagcgcagcaggtcgccgaagagaaaggattttcccaagtgctttggctggacggcattgagaagaaatacatcgaagaagttggaagcatgaacatcttcttcaaaatcaacggtgaaatcgtaacgccgatgctgaacggaagcatcctggaaggcattacgcgcaattcagtcatcgccttgcttaagcattggggctttcaagtttcagaacggaaaattgcgatcgatgaggtcatccaagcccataaagatggcatcctggaagaagccttcggaacaggtacagcagctgttatttccccagttggcgagctgatctggcaggatgaaacactttcgatcaacaacggtgaaacaggggaaatcgcaaaaaaactatatgacacgattacaggcattcaaaaaggcgctgtcgcagacgaattcggatggacgaccgaagtcgcagcgctgactgaaagcaagtaagaaaaagccggcccagtacaggccggctttttttacgcttcaattttgttgaaaaactgcggcagatacgctttgtgcgcctccagcatttcatctaaaatctgtttggccacagtatcggacgggacaagagggttaatcgtcatggcaaggagcgcagtttgatagtcacctgtaactgccgcttctgccgcgacacgttcaaaggatttgatttgctggacaaggccgcggacagacaccggcaagtcgccgacagcaattggcttagggccagttttcgtcatcacacagttcacttcaactgcggaatcgtctggaatactcgctattgcaccgttattgatcgtgttcaccggctgaatgtcgtgtttatcattgtaaatcgagctgattaagttacatgctgcatcactgtagtaagctccgccccgtttttccagctgcggcggtttgatcgcaaggtttggatctttataaagctcgaacagctctttttcgaccttctgtacgacttcagcgcgggtgccctccatttgtgatgcttccagttcgtgctccagcatctcttttgttttgaaatagtaacggtgatagccgcaagggatgacattgagcgcttttaagaaatccggttcccattcggcgcctgagatatttttcatcgtcatcgcgtttttcgggtcgcccatcgcctcgatgacttgctccttcacacttacgccatccaagaaaacatccagcccaaataccatatggttcagtccggcgaattggacttctacgcggtccacatctacatcaagcgctttggctacgcccattttgatgccgattggaacattacagagaccgacgactttcttcaggttggagtagcgaagcaaggcttctgttaccatgccggcagggtttgtgaagttaacaagccaagcgttcgggcaaagctcttctatgtcctttgcgatctcaaggatgaccggaattgtgcgcaatcctttaaacaggcctcccgggccgtttgtttcctggccaatcactccgtattttagcggaatgcgctcatcctttgctcttgcctgcaaaagtccgacacggaattgggtcgtgacaaagtctgcgtctttcagcgcttttctccggtcgagcgtaagatgaatgtcgatcgggacgccagctttttcaaccatccgtttggcgagtgtgccgacaatattcagcttttcttcgccctcggggatatcgacgagccataattcgcgcacaggcagctcatcataccgtttaataaacccttccactagctcgggcgtatagcttgaacctccgccaatcgttacaatcttcaatccttttgtcatatgcttgctcccctttgctcggtgattttttcatataactcaatgatctctgcagccatatccttcactgtcattgcattcattaaatgatcctgtgcatgaaccatcagaagcgtcatttccgtcttttctccgctcgcttcattttggatcagctctgtctgataatgatgggcttttgacaattcttcagcagcgtcttgaagctttttccgcgcttcttctgcgtcaccgcttttcgcagcggcaatggcctccattgcggagctcctaccgtttcctccgtgaaggatgatttgaaaaatgatttgttccatttcctcattcacgcgattcacttcctttctctacagagccgcttctttgtcatctgatgctgcaggcgtttggaccagctccagatcgttttcttctttcagcttctgcttatcccacattctgaagaatggatagtagacaacaaaggacacggcaatattaatggcttgcatgaccgcacctgagacttttcctcctgtcgccaagtagcctgaaaagatcggcggcatggtccacggcactgcgatacccgccggttttgcgacaaggccggtgctcattccgatgtacgtaagtgtcactgtgacaagcggtgtgatgataaacggaagtaagagcattgggttcatgacgatcggcattccgaatataatcggttcgttaatattgaagatggccggtccgaccgcaagcttcccgagctgcttcatttgtttgcttcgggcgcgcaggaacatcgtgacaaccagtgccaatgtggcgccgcttccgccgatattgacccagatatcgaaaaattgctgggtgaaaatcttaggaagctcctcaccggcttggaaggcgatccggttggcatccattgcgccgtaccaaatcggtgccatgacgccgccgacaatgtttgcaccgtgaaggccgcaggcccataaaagcattttgacggcttcggcgacaaggcttcctccaaggcttcctcccagaatggaaagcggagtccccaataaaacgcttacaatattatgaaggctttcaaacggtgtcgcttcaacaatcagccgggctgcccaaatcaggaagatgacggcaaagccggggattaacgcgacaaatgacttgcttaccgccggcggaacaccgtccggcattttgaagactaaattgcgctggataatgaggcggtaaatctctgtggacaccattgcgataatcatggcgacaaacaggcctttgcttcccatgagcgaaagcggaatcccgccgccaaccatgatttctttcgtcgcgccatccggcataaacggcacttgataaggtgttgctaataaaaatgccgcaagggaaatggctccggccgacaaggcatcaacgccgtatttctcggcgagccggtaggcgatgccgaacgcggcgacaagacccataatttcaaaggtcgcgtcgactgggtaggccagtttttcagaccaggagctgccaaacgtttttgccataaactcagcgtatcccgggatcgggaggttgccaatgatgaggaaaaaggaaccgatgataatcaggggcatcgtgaggataataccatcacgcagcgcctgcaaatgacgctgtcccgcaattcttcccgctataggcatgaccttttcttctaagatctgattgactttattcacatagcccgcccctctctatgacacatgtccaagctgttcagctgatttcagcacttccgccccgttgcacgtgccataatggacggtattaatgacgtctaccggaaccccctttgactctcctaattttttgagctgcggaagcatgtaacggacttgcggaccgagaagcaatacatccgctttatcgatatgattttgtacagaatcgcctgaaactgcccaaatggtatagtcttttccctgttcctgcgcacttttttccatcttgctcaccagtaaactagtagacatgcctgctgcacaaacgagtaatatattcatgtaaaagaccccctagagtttgatcaattttgtaatgtcctgctgttgctatcatcatattatgaaatcgctttcataaacactcagggtttttccgcaggcaacggaaaaaaggtatatacaggctgtcagctcagcattttttggtcaaacacatccgaaagctcttgaaatgaacggcatttgaccagctggttcaccgccgccgggtcatccaaaatgctgccaagcagtttatacatgctttgcaagtccgctttgttctccttttcgacacaaagcagacagacaaattgaactcgctgactctcccaatcgatcggttttttgagcgtacaaacggcccaaaacgttgttttcgtctgcggaacaagcgggtgcgggatggcaacaagattgccaaaacacgttggcgacatgtcttctctttcaaaaatggaatctatgatttcttcatcggcaaagccgcattcgaccgctttctgccctaaaaattgaatcacttcttcttttgagcgcagatcctcctgaaaaaaaacgagttctttttttaggtagcgattggctttttccttttcatcactcagaatagattctatttttgtaaagtcagttccgcctaagatggtgttaaccttcagtactggtacagggagctcttttttaatcggaatggtactgatgacaaaatcaattgattcgtaggacatttgatcaagactataatactcagccgttccaagaatatcgagccgcttgccgaaatgggaacgcagtttttcgcgcagaagctgggcgcttccggcacccgatgcgcatacaatgatacagcgtttcggcggactttctgttttttttcgttcaatcgcggcgccaaagtggagagccaaatatccaatttcgttttcatgaatctcaatacccgtttgttcctttatcacgattccggcaatgatcccggcttcaaaagcgagtggataatgttccttgatcgctgccagcatcggatttcgaagattcatgccgtatcggttgcggctgatcgccggcttcatatgcagggccaagccgattttcagctctttgtcatgcaggatgccaagcttcagttcacgatcaacagctttgatcatggcaagtgtcagctgatcggtttcctcttctattgaaaatgtgtcctctccgcattgtgattgtgtcattcgttttgtgccaaggagatgcatggtgatgtaggccgtctcgtctttcggaaacgtaacggcaagctttgattccagctcttttacgatggcttctgcagcctggtactccttttgatgcaggatatgatccatatctttcgggaaaagagaaacatagttttccgttctgatccgtttacaggcgatagcgatatggataatgaggttattcagtcccatgttggacagagggatgcggtcgtttttcatttttttcaagatggcggaacggatgatctcaatttcttcttttggcaaaatatcagccttttcatttaaaacatctatctccgtttctctttcatcaacaatgtactccgccatgcagtacctcatctgcacctcgtccccgcgcagcttgaagccgtaattcggacgtgtttccatgacgatgcggtaaggcagcagacgtttctttacttcctttaaatccgtttggagtgtagattttgagataaatagttcttcagcaagttcatcgagcttgagataatggtccgccagcagcagacgtttcataagataggccattctctcctccggcaataccggcaggccctttttttgctgaaattcatcttgcagcagtgttctgaatacttgctcgtcatcaatgcggagcttgtagccggagcctcttacagattgtacaaaggcaccgtggccgcttagcacaccttgaagttcctttatatcattgcggactgtccgcgtcgttacgtttaattgcgcggcaaaaaacgaacttgtcaccggggcttcagccgccatcagcaagcgcagaatatcacgtagtcgcccatgaagcatgagaaaaacctcctaactagtagatgcagggattcagtgaataggcagaaaggatgatgaagggatgcgaaatgtatataaattctataatggagagaatggcaagtcaatgaacatccggaggactagagggaaaactgacctataaaaaaacagccgggatcagccggctgttctagatgcggacatattcttttgtttagacgccttgcggtccttcatgatttttcgaacaatcgggtaaatgaccggcgcccatttgataacggttttgatcatctttttcaaagctccgattctcccttcttttttctcaaccattcccctgattgcctcttccttaaacatgctaacgcgacacgtacctgtttcccgtcacccagaaacgccatggataatcgcgtgcctccccgctgttgtcaatgccgatgcgcgggccggttgaaattgcttccggtgtgtacccgctttcgatgtaaagcggctgttccgtgatccagcgtccgtagtcattcatcgtgacgccaagcgctttcgtcagctttcctggtccgtttgtccattccctcggactcctgcccggccttctctcctccattaacagctggccttcatgcggctcaatcgccctgattaatactgcttgcgggacatcctcttccgccgcaacgacattcagcaatgtatgggtgtgcatcacgtatgtatatacccgcccagcttctgcaaacatgatctcagtccgcttcgtccggcggttgttaaagctgtgggccgctctgtctccagcccccatataggcctctgtttccacaatatagcctgacgctgtgccttcgtctgtttcttttacaagaaggcagcccagaagcgatggggcaagctcaagagcggttttttgataaaacgtgatgggcagcggatttttttctctcgtcacgaatcgacctctccttttaccgatttttgtacattgtaccattcccgaagcagatcaaaaaaaacggctgttttaaaatctttccattcagggaatattgttaccgttcaaaaaaggagggccaaccattgaaagatgatcatcaaaacaagcagcaccaatcaaatgcccaagggagcgaggaagcgttttctcataagacatccgggaaaaacgagtcagaggataccttaacgaataggcaggggcatcctgttactgacaaccagaatgtgagaaccgtcgggaatagagggcctacaacacttgagaactatgattttctcgaaaagatcagccacttcgaccgggaacgcatcccagagcgggttgttcatgccaggggagcaggtgcacatggatattttgaagcgtacggaagcttcggagacgaaccgatttcaacatacacaagggccaagctctttcaggaaaaaggcaagaaaacaccggcatttgtccgtttttcaactgtgaatcatggaaaacactcgcctgaaacattgagagacccgcgcggttttgctgtaaagctatatacagaagacggaaactgggatttggtcggaaacaacctgaaaatcttttttatccgcgacccgctgaaatttccggatcttgtacacgcatttcagcctgatccagtgacaaacatccaggatggtgaacgtatcttcgatttcatttctcaatctcctgaagcgacacacatgatcaccttcttgttttcgccttggggcattccggccaactaccggcaaatgcagggttcaggcgtacatgcctataaatgggtgaatgaggagggcaaggccgttctcgtgaaataccattttgaaccgaagcagggcatccgcaacctgacacagaaggaagcagaagagattcaagggaaaaactttaaccatgccacacaggatttatatgacgcgattgaaaatggcgattatccagagtgggaagtgtatgcacaaatcatgagcgatgatgagcatcctgaactggactttgatcctcttgatccgacaaaactgtggtataaagacgattttccatggaaaccgatcggcaaattggttctgaacaaaaatccggaaaactaccatgcggaagtggagcaagcttcatttggaacgggggtgcttgtcgacgggcttgatttttcagacgacaaattgctccaggggcgtacgtttgcctactctgatacgcagcgctaccgtgtaggcgcaaattacctgcagcttccgatcaactcgccgaaaaagtatgtcgccaccaaccaggaaggcgggcaaatgcaatatcgggtcgatagagcagaaggacaaaacccgcacgtcaactatgagccatccattatgggcgggctgaaggaagcgaagcaggacggaaaagaccatacgccgcatgtcgaaggcgatgtaaagcgtgaagcgattgacagaacaaacaacttcggacaggctggagaaacgtaccggagatttactgaatttgagcggaacgaattgattacgaatttggtgaatacgctttctacgtgccgaaaagaaattcaggatcaaatgattgagaatttcacaaaagctgatcctgactacggaaaacgcgtagcagaagggctaaaaaaggtttccgaaaacaacagcaacgggccgatcggcacaactgaaacggaacaggctgcaaagcaggctgaacaggagagccatccatctaatccgtattaacaacagcgaacagggctttttttgaagccctgtttttttatttttctattgaaacgttttcaacaattgtgttgtactggaaggaaaggggtggagagatacgatggaattacagcaggacttgattcctcagaaaaaaacaatcggcgccttagatcacgccgtttttttatgcatggtattttgtttctggttttcaggctatatttacgttcctgtattcagtctgtatttggaggatctgcacttttcatatggcgcaatcggcatcattctcggcagctacggggtcacgcaaatccttctgcgattcccgctcggccttgtgtcagacatcctgttttccttgcgcaagcaattgttaattgccgggttcggcttttccgtcctcagcagcctgctttttctgatgtttgattctttcttcttcgtgctggccgcccggcttttcgcgggaatcactgcttctatgtgggtgatggcgaccattttatacgcacattatttcaacaatggcaatgcatcaaaagcaatgggcatcatgcagttttttaccgtcatgcctcagtttgccagcattgtgttctgcgggcttgcggcagcccatttaggcaggcaggttcctttttggatggcgctggcagcctcggtcgccggtctggtgatctgctgctttattaaggatccgtctgctcctcccgcaaaccgtgacaccattcgtgtcaatcagtacatcaaagatacattgcagctgccaaagctgaagcttttcaccatcctgtctatgacggcccatgccgtattatttatcacagtattttgttttacgccgctttacatgaatcagctcggaatgggtgacgcggagcttctttgggtgatgagcgcctttttcctcccacacgcagccgccacattaagctttgtgtttctgcgctttacaagccgtatcgcttactccgtgatgctcattagtttcgctgtcaccggggtctgtttgctatatgttcctttttcagctgcattgttcacggtttgcatcacacacgcctgtatcggactggcgctcggcttcgtttttcctctgttgctaagccatgtcgtcgaaatcagttctgcccgattaaaaatgtcagtgatggggttttatcaatcattttatgcgctaggcatcttcctcgggccccttcttgccggaaaaatcgcacagcttgtcgggcttgcgggagttttttatggagccgggtttctggcatttgccgccttttttgtgatgctcgcgcaaaaacgtaacatgatcaattaatagctttcataccgccggaagcgccacacagaaaacacggccagaagcatgatgcacagaatggagaaagtgagtgaccatccgaaaaaatctgcccgctctccatgaagaaggatatgctccgcctgcttgcaaatctcagccggaagccacttcgcaccatctggaaatagtgaaacagcaaaggaaacggctgctgtgagcccgatcccgcaagccgcagctgctccgacagaccggaatatcgtacttccggcaaggccggcggtcacaataaatatcacccaaagcgcgtaaaggccaaggcttgcggcaaagcggctgaatgatgcgtcctcaaacagcagccggacgtaataataagcaagcccgtatccagctgcaaacgacataatgccgatcacgctttggatgagccatttactcacgatataatgggctgccgtcacaggccgcgacataatcagcgctgttaccccttgatttctttcattggctacactgcccatcacgctaaagatgaccagagccatgccaagcgtgttgaattgagaaagcgtgcttaccatcacttcagacccggagggcatcgtaaaactgattttcatgccgtcaggaaggttccctccatgtgcgatgatttccggcatataataaatggtcagcggctgtgtcagcccgacgatcatcatcgcaatcggcagccaaatcagcttgccgcttttccatccttccagccactccttctgcaaaagcgccatcatcaccttcatgcgtgcaccacctttagatagacgtcttctagagactccgttttctgttcaaatcgggtgacggtcaatccctttcggatacagtcacttaataatgaccggccagcttgtatatcaggcagctcgaaaacagcttgggacggatttttatagacaatagctgagacgtaaggcttctcttcaagccagccttccagcttctctttcactgaaagggtaaaaacgttcgtttgctgctgttgtttcagctcctgtaactcgcctttccatgaaatttcaccatttttcataatcaccacttgatcacacacctgctctgcatcgtgcaaaacatgtgtagaaaacagaacggccatatgctttttcagctcccgcatcatgtccagcacctcgaaccgtcctgtcggatcaagcgcagacaccggttcatccaatatcaaaaacttcggtttatggagcagtgcctgtgccagaccgagtctttgtttcatgcctcctgaatagcccccgatctttttgtgcgccgcttcgtgcaaacccacaaattccagcatctcgccgatttcctcttggcattttctcttcgaaaggccggacagtctccccgcaaatgtcaaaaattcatttgcggtcatccaggaataaaaagctggatactgcgggaggtacccaatcaaacgccgatccggctttttttctcctaacagcttaatgtttccggaggttggcgaaagcagaccggccagcatttgcagagtcgtggttttgccggctccattaggtcctaatagtgcgacacactcattttcattcacgtgaaaactgacattctttacagcttcatgatgcctgtacgatttgcataatgattcaatagacagcatatcggcttacctttgctttctgccgacggtaaaaaacaaaatcggcccaataatattgatacatacaatgattgcagcccacatccactttggcccgtttgtccgctcttcttttatacagctgataagggcaaacaccgccaaagccagctgtaatacaatcagcggcaaaatcatttcccaagaaatattcattgcttgatcccccttttcttccgatccggcctaatgacaaaaaagtaataacaaatcagaggcatcggtgcttgaatcaatccgacaatcccccaaacccatgccatgcgattacgttttttcgcatcaataaataaaaagattccctgcgccaatacgatgagacaagccgcaaccgttatgataatttctgtttgtgtcatccgcgtttcacctcgcattcgccgagatgcctttttttctcagccgcaatcaaaatcggcagcaccgcaagcacacaaacctgaagcacaataaacacagcaggagcttgagtgaaagctaagattgcagcactcacaaccatcagcgcgcagaatacaaataaaatgatctcttgaagaagtttttttctgtattcagctttcatttgtgacagctggtgaagcagttctttttgattcggtatagagggattggctgtttgatcaatttttttccattctgactttaaatgatcagaaagcttttctttattcatcgtcccactcctttctgatttgctggagccctttatgaactctggactttacagtgccttctttgatttgaagcatcaccccgatttcagcgtaggtatagccgtagtaatgccttaataaaaccggtgtgcgcagtttagggtccagctttgaaaacagatcgagcgtttcgctccactctgcccctttcgccgacacgtcccacttgatcttgcggattgtttcctccgtaactgtctgattccgtttccattctctctttctctttttctgatgatcgagatagagccgcgatgcaatggagatcagccatgtggagaattttgaacggccctgaaagcttcttaaatggatgtaccctttcagaaaggtttcctgaacaagttcctcgctgagatcggggtgaagggaaagctttaacaagtatttatataagaaagaatagtgatagtggaaaagggctgtaaacgcctcgtcgtttccctctttcgcctgctggatcagccgctgttcttcatgtgtatccaatgaccgtgatccccccttttttgtttttctgccttatgagacgacaccggattcaaaagcgttcatcttttttacaattcttttcagccattgacagatcaggcttcccggccgtttggctgcatatccttatttgtaaacccccttatagtctgttaagctatgactttatgtcgatttcaaaaaaacatccaatatggaggacgatgcattgaaagtagaaaggcgaacgattgaatatattccgaatgaagaaagacatggtaaagcgaaagatttatttcccgtatggttcggggctaatatgcatatcaccacgttagtgaccggcacgattcccgttgcaatgggacttaatctgttttggagtgttgccgctattatttgcggaaccttaatcggtgccatatttatggcgtctcattccgcgcaaggccctcagctaggcatcccgcaaatgattcaaagccgtgcccaattcggcgtaatcggagcgattcttcccctcttcttagtcatgtttatctaccttggtttcttcgcaagcagcacgattctggcggccggaaccttaagcagctttgttcccatcccgggatcatggagcattataggcttaagcgccttatgttttttactcaccattttcggccatgatttgattcacaaaatgcaaaaaatcctttcttggacctcttttgctgtattttttgctgcaacgattctcatttttcaattgccgattccggcaggcagctggattcccggagcgattgatctgccaattttcttggtggcagtcagcgcagttgcgacgtggcagcttgcctacgcgccatatgttgccgattattcaagatatctgccagttaaaacaccggcttcaaaaacattttggtacagctatgcaggtacatctgtcagctccatctggatgatgctgctcggcgcattgctgacaacctcacttcctgactttacggcaaactcaggcagccagattgtccaattgttcggtcccttctcgtttattatgctgatcattgtgttatttgggcaaatggcgatcaatgtttttaacctgtatggggctttcatgtccacgacaacaacgctggagccatttctgaaattaaaagtcacgcccaaagtcagaatcatcatgatcctgggtgtcacgcttgtcggcacagtcttaagcctactgggacagagcaattttatggagctgtttttgaattttatctttttcatcagttatttcttaattccgtggacggcaatcaatttagtcgattactacttcgtccgccacggaaagtatcaagtcaaagccatgttcgacgtaaacgggccttatggaaaggtcaattggatcaccacaattgcgttcgtgctgtctatcttgctggaaattccgtttatcaatacaagcttttacatcggaccgcttgccaaaatgtttggcggcggagacatcgcatggattatcggcttggccgtgccttctgtgctttactatgcattaatgaaaccgcgtctgaaaaaacgggcggggtatcaagaaaagctgtcttctctctgaagacagcttttttatcattcaaatcgtttccacacgcggggcaggatgtcagatagctcatgagcgagcaacgtatgagcggagtgctcgtccgtccagagctcggcgcacgcaccatgcaaatagaccgcgtttaatatggcgtgctttggatcttcatggcagcagagcatccccaatatcatgcccgtcagcgtgtcaccggttccgcccttggcgagcgccccgtttccagttggattgagccagcagtctccatcaggaaacgcgatgacggtttggtttccttttaacacaatgacagtctgcagctgagccgcccattcctttgcatattccgctctttttttctgcaattcgttcacgggcacccctgtcattcgggaaaactcgcccgggtgcggcgtgaggatgacgggggcctcccgtttcggatatgtgcgcttcgccagcgctccggcatccaaaataacaggacaatcagccgtaagcacatgatcgactgcctgctgtacgctttccgtttgcggaaggcccggtccgatggcaatggcccggtacgtctcttcaagctgagcatccgccgcctttttccagccgtcacgccaataggtcgcctcgggcaaaacaggaacaattagcgggattacgctttctgatgtaccgatgacaagcttgccgagaccgctccgcatggccccaagccctgcaagcagcgctgctcccggcatgtcgtcacttccagccagcagcaaagccgtaccgtacgtgcctttatggctctccgcatctctttcaggaagcgtggcccttacatgctcttccgtccaaaatggaacattcatctctatccctcctctgctttcttttcctatttttcctgtcccttttctttttcaaacaaaaaagacagccttttagggctgtcttttattttacaggaacatcaaggtgatacaggcggcgatatcgttcgtttgccgccagcagctcctcatgggttccttccatttctgttttgccgttttcgagaaatacgattttatcggctgcttccactcccgcgagatggtgtgtaatccataaaatcgtttttcctttcagcacctcaaacaccgtttccatcaattcacgttcggtaataggatcgaggccgactgttggctcatcgaggatgatgatcggtgtatcctgcagcaaaatcctcgcaagtgcgatccgctggcgctctccaccggaaaaacggatgccggtttcttgtacagaggtatgatatccatcaggcaatgactcaatgtagtcatgcagcttgacctgctttgcggcgcggcgcacatcctcgtcgcttgcttctccgtttccgagcctgatgttgttcaaaatacttgtatcaaacaggtgcggtttttgatttaacacggccaccgcatccgcaatctgatcctttaacagcgctgtctccactccgtttaacgtcacagaaccggagtccggtttcaaggcgccttcgattaatgcaagcgatgttgatttcccagagccgcttcggccgagcagcgccattttttctccttggcgcagcgtaaaggaaaagttgtgcagcacttggctgctgttgtcataagaaaacgtcacatcacgaaaggccaaggtgacatcttgaagatcgagcatttgatcccctgattcagtttgtgacgcctccagctgaggagccaccttgttcatgcgtctgatagaatcctgatagcccggcacttcgcctaaggcatccgaaagcggcaaaaaggcttccgtcaacggaaataccactagcacaaaagcggcaatcatcgttttagcgagctcgccgtccgcttgctgtcccgctgtccaaaacagcatcatcaaaataaggccggcgacaaggcattgcgcaacaaagtcccgccatcttgtaaagcattgttttttccgttcaagctcaaaccaatcatgttcctctttttcataagcatcaataaaagcatgccggcgtccgctgaacatccagtcgctgacacccatcacagcatctgtcagacggctgtacagcgcattccgtccgcttttcagcttcgcattcttcgctctcgtcacgagcaaagacacaaccggaaacaatacaacaagaacaaacaaatacagcgcaagcaatatggcaaacggccaagagaagaagccgagcgctatcactgacacagcatacaggagcaaggctgagatcgcaggaaaaatcgtttttaagaatgcatcctgcaaatgctcaatatcctcagacaaaatgccgagcatatcccccgtgcgaaaacgggaacgcagcatcaaagcacccggctcaagcatattgtaaaggcggacgcgcatgtcggatacgattttcaaaatgatgtgatgcccgacaagccgttccacatatcgcgacacagaccgcgcaatcccaaaagtgcgcactgcgacaatcggcacataaatgagcagaatgttttccggccttgtcgccgctttagaaatcaaaaacccagaggtgaacatgagaaaagcagcagaaaaaatcgtcaccgcgcccaaaaagataaccagaacaaacaggcgggcattttgcttgatatacggcaaaatccattcttctttcttcatgctctttcccccagttgtgccttcacgagtttggtatacacaccgtttttctccagcagttcattgtgagtcccgatttccgcaatcctgcccccgtccagcacgataatttcgtccatatcgagcatccagtgaaggcggtgagtcgcgagaaagacgagcttatcctcaaataaatccagcatcgtttcttttatttcatattctgtttcgatatcaagatgggcggtcggctcatccagcagcaggatcggacggtttcccaaaaaggcgcgggccagcgcgacacgctgtgcctggccgccgctgagcgcccggccgccttccccgatccgcccctctaatccttgaggaaggctatccaccagctccgccagtccagctgccgcagcagcacgggctgtatcctctgccgaagcgcttggatggtagaagcgaatgttgttgccaagcgtatcatcaaaaatgtacggatgctgtggaatgtaaagaaggttcttctgccagctgccgtcctgcaaatgggaccggcttgtaccattaacctcaatcatcccgccatccggctctaaaaatccgccaagaatatcaattaatgttgattttccggcgccgcttgcaccgataataccgatttttttcttgcccttgaatgagagatgaatatcagacaccgaacggccgactgacacgcctgacagcttcagctcatcctgatcagaccaagcctcgagctgaagcggcgtctcttctttaaaaccaggctgcgacaaaatctcttgaatggtttttcctgcttcctggccgttcagcgttgcatgataatcattccccacttcccgcaccggcaaaaaatactcaggcgccagaataagcgccgttaaagcagggccaagcaaaatatcgccgtcaatgaggcgcaggcccagaaatactgcgactgtcgccaccgacagcatcgtgaaaaaatcgagggcgaatgatgacaaaaacgccacccggagtgtgctcatcgttgccttgcgataccgctcactcacatagaaaatatttttgctgtgtgacttgctcaaacctaggaaacgcaatgtctccagcccgcgaagagaatcaacaaaatgattggaaagtctctgataggatttccactgacgatccgcttttctctgcgcgacaaggccgaggagaatcataaagatgatcagaatcggcatagcagcgactaaaatgatggctgatgtccgatcctgaaaaaacacataaatgacaactgccgcaggcacaatcgccatgctgaccattttcggcagaaacagctccaggtagcggcggaactggctgatgcctcccatcgccagcgtcaccatttgccccgtcccctctttctttgcaaagcgggggcctaatcggaacagctgatcaagaaaacttttcctcaaatctgctcctgtccgggcggcgtattgatagacgattttctgtcgcgccaccgtcaccccgtgccgggcgataaaagcgatgaggaaaaagccgatcatcggaaaaagggaggtaatgcccttcccgttgaacagtccggttacggcctcactcagccactctgcctgcataataatggcggctgtctgaatcatcgttaaacaagtaatcaaggtgagaatccgcttcattcctttatatcgaaacaggtcttttcccattaataagtcataggctccttatggctgacgcgcttccggaagacataatagctccagatctggctgccgatgacgaacggcaatagcgttaatgctgcaattgacatgactttaagcgaataatctccggaagaagcgttagctactgttaaatcgtatgcgctatgaagcgagctgaccattacgcgagggaatagggaaataaagatcattcccacggtcagcgccagaccagcgcctgtcatcccaaatgtccagccgtcttttttcttacgaataaatacagccgcgagcataaagcagatgacaatcaaaacagcgagcggaatggtaatctcgccgcggcgtgtaaacatgtctgtctgatacgcagaaagggccgcgaaggcaagaaccgctacaaaaacaacacccattatcttttgcgccattttccgggcgcggttttgcaaatcaccaatcgtacgcagcgtgataaacattaatccatgctggaagcaaagaagcgttaccgtcacaccgccaagtatagaatatacattgatataatcagaaacatgtgcgtgaatgttcatgtcggcatcaatcggcatcccgcggaataatgtcgtgaacagcacaccaagcacaaacggaggaatcagactgccgaagaaaacgacccagtcccaaacctttacccattttaaatgatccaccttgccgcggaactcaaacgcgaccccgcggcccattaacgcaagcagcactatgacaaacggaatgtaataaccgctcagcatcgttgcataccagtttgggaatgccgcgaaaatggcgcctgcgccagtcaaaagccacacttcattcgcgtcccagaacggcccgatcgtgttgatcagcactctgcgttctaattcattatggccaagaaaacgggtcgccatgccgaccccgaaatcaaagccttccaaaaagaagaaacctacaaacaatacggcaacgagtataaaccaaagatcatgaagagatgccatggtatacctcctgactaaatggatctgttgatacaggaacatcatgatgatcactatgctccgcaccttttttaatctcacggataaacaagaagacaagcagtgcaccaagaatcaagtacatcacaccgaatgcgatgattgagaataacagggagcccgctgttacattaggcgacacggattgagcggttgtcattaaccccataaccgtccaaggctgacgtccgatttctgtcataatccagcccgcggagttcgcaagaaacgggaaggaaatcaacgcgatcatgatgcgcaaataccatttgctgttttcaagctttttgcggcggtttaaccaaaggccgcctaacgcagcaagaatcataacaacacctgctcctaccatgatgcggaagctccagaatgtcgttttcactggcggaatgtagtcgccttttccgtatattttttcgtactcagcctgaagggttttcatccctttgacacttccgctgaatttctgataagccaagtagctcaaggcataaggaactttgatttcatttgagcttttttcattttttgtatcgatcgtcgcaaaagcggtccaagcagcagggtcaccgctgtcttcccatagaccttcactggcagccattttcatcggctgtgattccatcaagtgctcagcctgcatgtgtccgctaaggccgacgccaagaccggcacaaagaccgacgatcattgcgagtttaaaagattgcttaaagaacggcacttcttttttcttcagcagtttaaaagcactcactccggcaataaagaaagctccagtggcaagcgcaccgaaaataacgtgcgggaattcaacccaaagctgagggtttgtaatcaacgcgccaaaatcattcatttccgcgcggccgtttttgatcgtaaaaccgaccggctcctgcataaaggagtttgctgttaaaatccagaaagatgacatgatcgttccgaatgatacgagccatatgcagagagcgtgaattttcttcggcaggcggtcccagccaaaaatccataatccgataaaaatagattccatgaaaaacgccaataatgcttcaatcgcaagcggagcgccaaatacatctccgacaaaacgggagtaatctgaccagttcagtccaaactggaattcttgcaaaatccccgttacaacaccgactgcgaaatttattaagaataagtgtccccaaaactttgccattttgagatacagttcatttttctttacaagataaagagtctccatcaacgcaaccataaacacaagcccgatagacatcggcacaaacaagaagtgaaacaacgttgttgatgcaaattgtatgcgggctaataccaattcactcatgctttctcctccatttccggttaaaactgttaatttgctcactacttcacaaatagaaccgagactttgatcagtaattcacaaaatagacgaaaaaaatattgttcaatatttcacaaatgtgtcaaaaagtcgtccaatatgagacaagattgccagactgaccaaatgacacaatctctgactggttcatattaagtactttacaacgattcatttcaaaaataaagcctaaaatacctaaaaagtcccgccctatgtgacggatttttgtctattttgttgcttatttatgtcggctgctaggataaatgaccctttattatcgtacatcaacacatcgttccttgcgaacaaaatgcttgccctgcaccagcactcgtttctcagcactccgtcataaacagattttaggcaggatgcctcttttcatttgaaccggcaagtggagaaaagttgaatagtaaatttttaatatattaataatttcaattttttagtatacttaacatagtgaacaatttcactgcatcaagaataggggaggtttttcaatgggagagcttcaaacacacatgcaattgcaaacggatacaattcacgaaggggttcgaaaagagaattggtttgcgaaagccatgaatataaaagtaggcatcataccgcttcctgtgtatgccttgctgtttatattaatcactgtttttgttatgcatcacgatgtaaaaagtgacattttgacatccattgccgtcatggcgtttttcgggtttacctttgcccaaatcggcaaatcgataccgattgttcgttctatcggcggcccggccatcctagctacttttattccgtccgctgtcgtgtactatcacctgctgcctaatgatatcgtcaaatccaccacagaatttacagaaaactcaaactttctatatttgtttatcgccggtattgtcgtcggaagcattctcggcatgaaaagagaaacactcgtaaaagcattcatgaaaatctttattccgcttattgtcggatctgtcacagccgctattgtcggactggctgtcgggacattgctcggactcggatttcagcataccctgctgtacattgtcattccgattatggctggaggagtcggagaaggcgctatcccgctgtccatcggatattctgacatcatgcccatttctcaaggggaagcgtttgcacttgttctgccatcgattatgctgggcagcttgtgcgcgattattctagcgggattgctgaaccgcatcggaaagaaaaaaccggaatggacaggcaacggcaaagtggaccgctccgaagaagagtcccctgcgctggaggaatctcaaagcggacaacaaatgttcaacctttctttatttgcgtcaggcggtatccttgctgtttctttatacttagtcggcatgctcgctcacgattttttcggttttccggcacccgttgccatgctgttactggctgttctaatcaagctgttcagattggtgcctgcctcaattgaaaatggcgcgtttggagtgtcccgctttttttcaacagctgtgacctacccgcttctctttgcgattggggtatccatgacgccgtgggacaagcttgtcgccgcttttaacctcagtaatattattacgattctgtctgtcgttgtgaccatgatggccgttggcttcttcactggaaaatggctgaacatgtatccgattgaaaccgccattatcaatgcgtgccattctggacaaggcggcacgggtgacgttgccattttaagcgccgctgaaaggcttgagttgatgccgttcgcccaggtatctacccgcatcgggggagcgatcacagtatccttaaccttattgctgctgcaccagttttattgatccccgcaagcaagttcttcgtcaaacgaaagagcttgcttttttgcatgtccatatttttgcaagttcccatcccatgctatagtaatagttggaaatactagatagaaaggaatctggcatgcctatgggaactcatctatttctctttatgcttctcgggctgggattttatttgatatcagccctagctgcaaaactcattccggccatagacttctggattgatattgttctatgggtcggcgctgcagtttacatcttctctcatctctcattcatggacggcattgtctcactcgcgacaatgttctactgctattggaccgcaatggatctcattgtttcagagcgtgtggaaaaaccttcgggagactggcaggaaatcgagctggccagaaacaaaacacgtctcctgtcagacattacgctgaccgccattgtgtttgcaggggctgttatttttttcatctatggacctgacccaagccctctcaaatatgtgatccttctcggcatgatctccggcggaggggcactggtgaagcgtatactgaatgttttcagcgtaaaggttttttattcagcagccttagaaaaattgcatatcagctcacactatgaaacccgtacatacccgctttccgatttgaaggacattcagcttgaatcaacagctgatctcttaaagctccatccgcttctgacgatgtattcatcacgtttagatttgacaacaagctttcagcaagtcattaaactgtctcttcccggcgaaacactgtttctgacggtgaaggaaccgcaaaaatggaaaacaattcttcaggaatacacagatgcaaaaaacaatgtggacaatgtgatttctgttttgccgttttatcatagaaaaaatgtgaagcggctgctcgggaagctttattttgccgccagcgtaaaaggggtatccgcttacgccttattggtgctcgcgttatacgcatcacacgcctctccatgggtcatggctgttgccgtaatcctatattgggtattcaacatgtatatgtcagaccgtgtgttgcgggcagcgatggacgccaagccttgtcatcatccgcatgtacaggcagcggccgatatgattttccgatcggccggcatttcccatgtccgcatatacgaaacggagagtgatgattacaacggaatggcagtaggcatgaatgtcgggaggtcaatggtcatcctgacaagcgccacactaacacttccacagcgtgtcatcgaaggcattctggcccatgaggcaattcatatcaaaaaacgtgacgttctgtcatcacagcttttgcgttttctatatcttggagctgtcgttgggattttcctcttgtttgagcagcatatcacccatcccgaggcccacaaaattgcgctttgggctttcattatggcaatcattatcctattccagctctatcaatccttttgttcacaatggatggaggtgcgtgctgacaaccttggcgcatccttgctggagggcggttacaaacaaatggctgaagccttgaaaatcttggcggttcagcaggatgaggacatacagaaacaaagtgcctacagctctgaagccggtgaagacgagcttcaaattgactctctcacccgtgataaaagctggtttttcagattgattgattttcagttcgctcctcatccccctatgtattggcgtgtcggcactttattgtcaaacaaaggacatggggtgctaaagcgctggctcagagaccgcctgaaagaatcgatcactttgaaatgaaaccggtcagcgtttcatccgtataacagatatggtgaaaaaagggagtgaccagaagtgatagtgatcttattgataatagctattattgtttttctttcagtcattcagccgcagccatcggataataaaatccgccagcaggcggacagcgggtatttcggttattcagatcatagctcgcaccatgatggattcggcagtgacggaggtttcagcgattccggctgtggcggcggagggggcggcgattaaacgccgcctttttttatttcattgattcgatgtacgcaccaaaagccgagcccgacatgcctggggacacgcgcacacgatggagggcatacattccctggtctctcgaagccgcgcccggttctgtcgtcacgcccatttgatagcctgttttttcagcggccttcagcgtctcctcattgtagcgccctaccggatagctgatgatggtggtttgctgatgaaacatgtggtcaaacagctttttcgaatccgccatctcactttgctgctgttgaggcgttaatccgttcagctcaaggtggtcaatcgtatggctttcaatcgatatgccgtgctgtgccatttccttcatttgttcctctgtcagatgatgcttatgtccgatcgatttgccgatcataaaaatcgttgccttcatcccgtactttttcagcaccggatacgcatcttgataattgtcggtgtacccgtcatcaaatgtgatcagcacgcacttctcactcggttttttatcctgcgtcagcatgagatatgcctctttcggcgttaatgtctgatagccgttatcatgaagccacttcatatgcgcctcgaattctttctttggcacacggaggctgtttcctgaagaaatgctgtggtacatcaaaatcggcagctttgccggtttctctgttttgatccatgcggatgtatcgtcttcttttttctgaacttgtactgcctttttttccggtttcttttgttccgcttttggcatcggctgctctgcattcgcctcttgatcagcgcaagccgcaagagccaaacagctgcccaaaagaaagatgcttaaaaacaatcgtttcatcgttctcctgctttctgtctatttcttcctcctttttcatcggtttgattctgagattttcaatagcaaaaaaccggacatgtctccatgtccggtttttttgatcctattgaattctcacttctgtctcactgtcaaagaaatggcctttattcatatcaaatgcaaccgtcagctcatcgcccgattgaatatcgaggcgggcgtcgatccgcgcaataaagtcttggttgtctatctgcgaataaatcataatttcagaaccgagcagctctgcaacattgattttcgccttaatcgaagagttcttatatgattccacgacaatcaattcatcatgtatatcctcaggacggatgccgaagatgacctctttgccgatgtagcctttttcacgcagcactttcatttttccttccgggacggttaatgccgcagaaccgattttgattaagccatccgtgagctttcctttgaaaaaattcatcgccggtgatccgataaacccgccgacaaagacgttttcagggaattcatatacatccttcggcgtcccgatctgctgaattttcccatctttcatgactacaatccgtgtcgccattgtcagcgcttctgtctggtcatgcgtcacataaatcgttgtagtctgcaatctctggtggagcttaatgatttccgcccgcatttgcaccctcagcttcgcgtccaggtttgacaaaggctcatccatcaggaacacctttgcatcccgcacgattgcccggcccagcgcaacccgctgtctctgtccgcctgacagcgctttcggtttacggtgcaaatattcctccagcccgagaattttagcagcttcctctactctttttttgatttcaggcttcggcattttccgaagcttgagcccgaacgcgatattatcgtagaccgtcatatgcggatagagcgcgtagttctgaaataccatcgcgatatccctgtcctttggcgctacatcattgacccgttttccttcaatataaaaatcgcctttcgaaatttcttcaagtcctgcgaccattcgcagcgtcgttgatttcccgcagccggacgggccgacgaatacgataaattccttatcggcaatatgaaggttaaagtcatcaaccgccggttccttctgatcataaaatttataaatgtgctccatccgcaattcagccatctaacatccccctttgttattgtaaacgctttcttatattgagtgtaacagcaattccctctcgctaaaatgggcagcgttcataaaatcatccagccatttttcgtgcatatttccaatttattctgaactttcattttgcaggcagataaaataggcaagaagcgcgcctttgtacgatttgatatctatccctgaccgctcaataaatttatcaatccgatattgcaggctgttgcgatgcagatgcagctttttcgctgttaatgtgacgtttgagttgttttcaataaacagcttaatggtcttccttagctcagcttcacttccaaataaaagctcagcttcttcagagagcagcgtttccagtttttctttttctgtttctaataatagaaaaggaaagatcatctcaaaggtcacactctgcacctgaggcagccgtttttcagcaaacaggaaatacgcctgttcacgagtgtaatgttttcgcagacactcatccggctcgtaaaatcttccggcgtaaaaacggacactgaagtagaaatcactttcaagaacttttgcgagcgattccagttcgcccttcttcgccgccgcttcactttcctgctcgacaatcacgcctctgtcctcatgaatccacacaatcacaaaagacaccggccaaaaatggcgaaccgcttctgtaaaggacgtcctttctattttgccgaataaatgaaagtgaacaaatctcgtccgtttctttatgtacgccggcaattcccctctggaaaaaaggaacgaaaaccacttgttttcctcaggtgatttcatagacagttgattgccctcatccgcaggcgtcaaaaatgattgcagcaccaatacttctttttcactgatctctgttttcggaatggagatatacctctgattgctctcatcaaaaaaacatagacagccttcccttatgcaaagctcctcagacacaatcgaaccgggataaatagccagcagcgatttcatagagtctcctctcttatgtaaggatctgtatattcagtataaggcgaaacacacatgttctccactaaaaaagagtatatccggtatagatagacgagaaactgaaagggaaacctcattcgtttacatattggcttcagcggaaatagaagaggatatgcaggaccaaaggagggccatcttatgagtttcgaaacgttaaacaaaagttttatcaatggaaaatggactgagggagaaagcggacgtacggaggacattttgaatccgtatgaccagtctgtgatcacaacagcatctttggcaacgggcaaacagctggaggatgcgtttggcattgcacagaaagcccaaaaagagtgggccaagagcacgacggaagaccgaaaagccgtcctgcaaaaagcgcgcggctatttacaggaaaaccgtgaagacatcattatgatgatcgcccgcgaaactggcggaacgatcattaaatcaacaatcgagctggaacaaacgattgcgattttagatgaagccatgacgtatactggtgaattaggcggcgtcaaagaggtgccatccgacattgaagggaaaaccaataagatttaccgccttccgctaggtgtcatttcatcgatttctccatttaatttcccaatgaatctatccatgagatccattgcgcccgcaattgcgctgggtaacagtgttgttcacaagcctgatatccaaactgctatttccggcgggaccatcattgcgaaagcgtttgaacacgccggtcttcctgccggtgtccttaacgtcatgctgacggatgtaagggaaatcggggacggcatgctcaccaatccaatcccgagattaatcagctttacagggtcaacagcagtcgggcgccacatcggtgaaatcgccgggcgtgccttcaaacgaatggcacttgagctcggcggcaacaatccatttgccgttctttcagatgcggatgtcgatcgtgctgtggatgccgcgattttcggaaaatttattcaccagggacaaatctgtatgattatcaacaggatcatcgttcatcaagatgtatacgatgagtttgtagaaaaattcaccgcccgtgtcaaacagcttccgtacggcgatcaaaccgatccgaaaaccgttgtcggcccgctgattaacgagcgccaaatcgagaaagcgctggagatcattgagcaggcaaagacagacggcattgagcttgcggttgaaggaaaacgcgtcggaaacgtgctgacgccgtacgtctttgtcggtgcggacaacaacagcaaaattgcccaaacggagctgtttgccccaatcgcaaccattattaaagctggcagcgaccaggaagcgattgacatggcaaatgatactgaatacggcctcagctctgcggttttcacttctgatttagaaaaaggcgaaaagttcgccctgcaaattgacagcggcatgacccatgtcaacgaccagtccgtcaatgattcgccgaatattgcctttggcggaaacaaagcaagcggtgtcggccgtttcggcaatccgtgggtcgtcgaggaatttaccgtgacgaaatggatttcgatacagaagcaataccgcaaatatccgttctaaatgaaaaaatccctctgtttcaagtacagagggatttttctttatttagatatatccacaaacccttcgccaaacacatcgcgtacgtcatgaacgatcacaaacgcttttttgtcgcagcttctaatgatttttttcagcatagacagctcctgtttgttaatgacgatatacaaaatctcttttgattggcccgtataatttcccttccctgataaaatcgtcacgccccgatccatcaaggtattcacctgctctgcaatctcactcttattttctgaaatgaccgtaatggcttttttcgtattcaaaccttcaataatgaagtccatcactttggtaccgatatacagcatcacgatcgtaaacatcattttttctgcaccaataataaaataagagctaaatactacgattaaatcaaaaaacaagagtgcatagctgatattccagtctaaatatttattagcaattctggccagaatcgcggaaccagccgtcgtcccgccgacccggataatcatgccgatcccgactccggcaaatacacctgcgaaaatcgtattaatgatcaattcatcagacggaatgctccacccatgtgtcagatgaagaaaaagcgaatttgccgcaaccgcaatgatcgtataaaccgttgtttttccatccagaaacttgtagccgattaaaagcaaaaacgcatttaagataaagttcgtgacaccaggagaccattgaaacagataatacaatatcagcgtaatcccagtgactccgccttccccaagatcattgggaatcgcaaataaattaaccgcaagcgcgaagaaaaaagcgccaatcacaagcataagtacatccagcattctctttttcatcacgaaaacactccttctcattgttctgttctactagcaaataaaaaaacccaggagaacgctctcgaaaaagagcagaaactcctgggcttttatcccaccgtgtcataacagccaatctgctatgtgttttctctcggtcacagtccaatttgcattgcggaaccctagaaaaccactgtttttatcatatccttttcactttccaatattagcattataagggacggttcgaattggttcaaggggtatttgcggagttttcatcagataagctggaagaaaaaacgatttatctattaaaaaagaacagatataaccgataagaaaaaaagcatatattttacaagtaaatgtaactataaatgataataattatgagaaattcataattttatattgactaagtgaaataatataggcattatagtacatatgtttcgtacattttattacataggaggaaatataatggcaggaaaactagtaccctgtaaagcttgcggtcaagaaattgcaaagggtgtaaaaaaatgtcctaactgcggtaaggatcaacgtaacttttttatgcgacataaaatcattacgtttattctcgcagttgttgtcatcattattatcggtaatatgattggcggcggaggcggttcagaagccacttccaaaacatcaagcggaagcaaagcagaaactgaaaaaacatacaatatcggtgatactgtaaaaactgaaaaaactgaagtgacagttacgaaggtagaggacagagatactgtcggtactcaatatgttgaaaagaaagcatctgatggtggtacaattgtagctgttcaatatacaattaaaaacgtatctaaaaagccaataagttctttttcaattccaactgttaaattagttgatgctgatggtacttcttatgattctgatattgatgcttctgtaaactatgcaactgagacaaaagttgataactctaaaattttgagtgatctaaatcctaatattaaagtaacaggtgtaaaagcatttgaagttgacaaggaagcttatgcaaaaggcacttggaaactaaaattcagtaatgatgttattgtgaaaatcaaataacagctaacaagggtgcctgttcaggcacccttgttctttaaaggccttctctattgagaaggcctccattcttattccgcactcttatacccattcacattagaagactgccatctccaggaatcagcacacatttcctcaaggccgcgtttcgcttcccagcccagttcccgcttggctttcgcaggatctgcaaagcatgtggcgatgtctcccgggcgacggtccgcaaaacggtacggaacctctttccctgacactttttcaaaggctttgaccatttcaagcacgctgtagcctgtgcctgttccaaggttgtatgcatcggctcctgtagagttcaatactttttccagcgccttgacgtggccttctgcgagatcaacgacgtgaatataatcgcgtacgcctgtcccgtcttttgtcggatagtcatttccgaatacgcttaattgctcaagcttcccgactgctacctgtgccacatacggcataaggttattagggattccgttcgggtcttcaccgatccgtccgcttggatgcgcgccgaacgggttaaagtaacgaagcagcgcaacgctccactcattgtcggctgtatgcaaatcacgcaatatttgttcaagcatgagcttcgtctgcccataagggtttgtcgcacctaatggaaagtcttccgtaatcggcgatgtttccggaacgccgtacactgtcgcagatgaactgaatacgattttcttgacgccgaatttctccatggcctcgcataaaataaacgttcctgtcagattgttatgataatatttgagcggaatcgccacagattcaccaactgcttttaacccagcaaaatgaatcacagcttcgatttcattttcagcaaaaaccgcatctaccgcttcccggtccaataagtccgcttcgtagaacgttaaatcttttcccgtaatccccttgacacggttcagcgcctcagccgaactgttggacagattatcaagaacaacaatctcgtagccgctgttcaataattcaacacatgtgtggctgccaatgtacccggcaccgccagtaacaagtattgccatgatgtaaccctcctaaaaaatgacctgttttcattatatagtgtttaaaaccggtccacatccatttttaagaagtttaatcgtttattaatagttttttcatatattatcagcattttcatacctttatgcagcgtgaacaagtatagcagctgaaaaatcaatctgccggttgacgtttttctttccctttttcgctatgcttaatgtagaaaggatttgatgacatggcgatgagcccatatatttttattgtattgattcttattattttatcgatgtaccgagagagagctgtcagacccgggaagttgctgatcattccgctgctgctcttatggggcgtatcagcatcgtttcagccggcgtattttcattccgtattacatgtggcgatcagcggcattttattattaatcgggctggcctgcgggtttggcattggaaagatggtaaacgtgcggattcacccggaaaccggaaaggtcacttcacgcggctcacttgggagtgttatcctcattctagtgatactttctttgcgcatggccgcgagaacatggctgcctgagagcaacgagatgtttattgccattattcattctatgttcttcattcccctcggcaccattacagcccgtaacattatgctttataaagcatacagacggctgaccgctggcaaggtatccattcaataactgaaagaaggaccagcatgaacagacaaactccggctcggcactactacaagaagcttgtgccgagccttattctcattttgaattgcatacaatttttatctcacccagccaaagctgatcccattttgttggcatttgtatttgcggtgtacttagcattcatttgggtcattccctatgtggcatccactgctgttagtttgtgcatattcatcggactctggctcctgaccgatttcttttgggctgtttccggccaagagcagggtgccgcctattttttgattgtatttttaatgatatatgccgcctttagactcccttcacggctatccttgatcttcacagcatgtttaattggaggcaacatattactcctatcctcacaagggggaagcttgaataccatcatcagcaacatctcgatcatgctcgggctgtacgtcctcttctcctccatgcgtttcagacgagaagcgagaagggaggctgaacggaatcatgctgaattggcaaaaatgcatgtgcagctggagcatgctcataaagaactccagaaagcgcatgcagagctgcaggaggcttctgttctttcattaaggtacgcggtccttgaggaacgtacaagaattgcccgcgacattcatgacagcatcggtcacgagctgacttctgttattgttcagcttcaatcccttccctatatccttaaaagcagcaaggaggattcagaaaaagtcattcaaaatgtactgagtgtcgccagggaatgtcttcaagaagtacggtctgtcgttcaccaaatgggccgtagtgaatcgatggtggggcttaccgctttgcgggggctcattcatcaagtggaggaacggagcggcttgcacgtttctttagatactgccggactatcagaagagtcttggcctccaaacgtgagcgaaacgatctaccgcatcttgcaggaagcgctgaccaatatcattcgtcacgctgacgcttctcatgcggcggccgtcatttctaacgacaagtcccatctctatatcacaatcaccgacgacggacaattcaccggcagccttacttatggatttggcctgacaggaatgaaagagcgcgcagaaaaagcaggcggttcccttactttcagtgccgtacagccgagcggcctgaaaattgagctgtcattgccgctcatgacaacgaataaggagcaaaaagatgaacaaagataacatacgcgtcgcgcttgccgatgatcagccgcttgtgcgtgaaggcttccgctacgtcatcaacgcacagacggatatgacggtttctggcgaggccggcgacggtcacgatattatagcactcgcaaaacaaacaaaacccgatgtcatcctcatggatgtccagatgccgcgttgctcaggcatcgaagcagcgaaagacattatgtccgcacttccagatacaaagatagtcattttaaccacctttgacacggaagaatacgtatttgaaggcatccgtgcgggagcagtaggctatctgctgaaggatacacttcctgaagagttgatagatgcgattcgcgctgcggccagaggcgaggcgattttccgtacagtcacagctgctaaaattatcagtgagacatttcaggcgaagcaacagccccatccagaagaactggcagagccgttcaccaaaagagagcttgaggttcttcagcaaatggcctacggactgagaaatgaggatattgctgaaaagcttttcgtcagtgaaagcactgtgaaaacccacgtgcaccgcatcctgcaaaaatgcaatgcccaagaccggacacaggcagtcgtttttgccattcgaaacggtattgtgcaatagaaatctctcatcccgccatgctaaaataagacaaaggagatgattggaaatgaaagaagaaatcattgaacggtttactacatatgtaaaagtcgacacacagtccgatgaatccgttgacacttgtccttccacacccggccaattgacattaggaaacatgctcgttgatgaattgaagtccatcggcatgcaggatgcagccattgatgaaaacggctatgtcatggcaactcttccctccaatactgaaaaagacgtgccgacaatcggctttctcgctcacgtcgacaccgctacagactttaccggcaaaaacgtgaatccgcaaatcatcgaaagctatgatggaaaagacatcgttctcaacaaacagctgcaggtcaccctgtcacctgatcaattccctgagctgtctggctataagggccatacactcatcaccacagacggcactacccttctcggcgcagacaataaggccggtatcgctgaaatcatgacagccatggattacctcatcaaacaccctgaaatcaagcacggcccgatcagagtcgcctttacgcctgatgaagaaatcggaagagggccgcacaaatttgatgtgaaacggttcaatgcttcctttgcctacacggttgacggcgggccgctcggcgagcttgaatacgaaagcttcaatgccgctgccgcaaaaattacgattaaaggcaacaacgtacatcccggcacggcaaaagggaaaatgatcaactctgcgaaaatcgcgatgaagctgaacagcctgctgccggcagacgaagcgcctgaatatacggaaggctatgaaggcttctaccacctgctgtcgattcaaggagacgtagaggaaacaaagctccactacattattagagactttgacaaagagaatttccaaaacagaaaagaaacaatgaagcgtgtcgttgaagtacttcaaaacgaatacggacaagacaggattctgctggatatgaacgaccaatactacaacatgagagagaaaattgaacctgtcatcgaaatcgtcaacattgccaagcaagcgatggaaaacctcggcatcgaaccgaagatttctcccatccgcggcggcaccgacggatcgcagctgtcctatatggggcttccgacgccaaacatctttacaggcggggaaaatttccacggcaaatttgaatacatctcagttgacaacatggtcaaagccgtaaatgttatcgttgagattgcaaagcagtttgaagcgcaagcctaatgccaaaaaaccagtccaaaaaaggactggcttttttgtgtgaaagtgaaacattttaaacgcgtcctccgtaaaacaagtattaacaaatgaggaggaaaaacaatgacaaaacatgcaatcgctgcaaagagtctcttgaaaaaatggatcatttccaggccgcttaacatgcaaaagaaatccagcccatttcaaaaaatcagaaaaatgttcaaacgcttcttcaaataaaacattcaaatcccctaaatacaatccgtattcacccgtaccgcccaaatgctccgtaatttgggttttttgtgttcaattccgcaaaatagggtataaaccaaacaagcaagaaaacagcacccaaaaacaggtaattcgaattacgtaaacttaggttaaaagttatataaaggaatttattttatcgtcgatagtaactatagaaccaatcatcaacgagagcaaacagcgtaattcaagactattttcaggtcatcaggtaatactgttttagagggacagtttcttgttatttattgatttagaattttttgaatactttttggcattttatccgtacaatagagagtaccaaaactttttttgggaggtatgtaatatgatcctatttattatcatcgcattatgcggctatcttcttttttctttcagcaaggacaatcgccgcaaaccgcaaaagacaagccctctgccagcagccgcacctcatcacaacaacctaatcgaccttgacgccatccgccaaaaacgccggatgcatctttcctaattctatatttcaaacgaaaaggctgctgaatcacgcagccttttaaaattgttttgatttagagcctgaaaccttttcgccacatatccgtaatttcatacaaggcaaacccaaaggagacttcagcaatgatcgagttatttatgaaacaaaaaatgttctcatttaaagatgcatttcacatttatgaccgggatgaacaagaaacattcaaggtggaggggcgttttttctcgttaggagactcattacaaatgacagactcatctgggaaaacgctcgtttccatagaacaaaaactaatgtctttattgccgcgctatgagatttcaattggcgggaaaacagtttgtgaggtaacgaagaaatgtaacgtttttcaaaccgaaatttgtgatttccgggcttaactgggaaatcgatggtgatttatggagggatgaattccagctgacggacggggaaaatgtccggatgtcagtgagcaaaaagtggctcagttggggtgattcctatcacttgcagattgcaaacgaggaagatgttctgatttgcactgccatcgctatcgtgcttgatatggttttatataacgatgaagatgaaggtattttctaaaaagcattgacaattgatccaaaagtaataatattaagataattgaaatctgaatatgaagttataccttatcaagagaggtggagggactggccctatgatacccggcaaccgctgtttcaaacagaatggtgctaaatccttaagaacattgtgttcttgcagatgaggcggagatttgatcgttcaagctcttccttacacaaaggaagagctttttacatgctcaatatttcagaaaagaggcgaataacatggctcaacaaacgaatgttgcaggacaaaaaacagaaaaacaacgcaaagcacctttccgcgccgatcatgtcggcagcttgcttcgttccgttccggtaaaggaatcccggcaaaaaaaagcggcaggtgagatgacagcggaacagcttcgtgatatcgaaaatcaagagatcacccgcatcgtggaaaaacaaaaagaaatcggtctcgatgtggtaacagacggggaattccggcgttcctggtggcattatgacttcctggaagggcttgacggtgtggaaccgttcattccggctgaggggattcagttccataacacaaaaacgaaagcgcgcagcatcaaagtgacgggaaaactcgattttacgagccacccagcgcttgctgattatcaatttttacatgagattgccggtaacgcgacgccaaaattgaccattcccagcccaaatatgctgttttttggcgaaaaggcggataaagggatttatgacgatcaagaggaatactttcatgatctggcccaagcgtacaaaaaagcaatcaaagccttctatgatgctggctgccgttatctccagctcgatgatacgtcatggtctctcttctttgaggaaaaaggcagagaggttgtccgggcgctcggcggcgatccagaaacattgccagccatatttgccaaaacaattaacgatgccgtcgcagaccggcctgacgatttaacgatcacaatgcacatttgccgcggcaacttccgctcaacctgggcggcatcaggagggtacgacgctgtagcggaaacgattttggacggcttaaaccttgacggccttttcttggaatacgatgatgaccgctccggaaactttgatccgctccgttttgtgaagcgcaaggatctgcaaattgtgctcggcttgatcacatcgaaatacggcgagcttgaaaatcctgaggatgtgaaacgccgtatcaatgaagccgcgcgttttgtcagcttggaccagctatgcctgagcccgcagtgcggtttcgcctctacagaagaaggcaaccttctgacagaggagcagcaatgggcaaagcttcgccatgtcatcgacattgccaacgatgtgtggagataatctatcattgacagaaatagaaaatgtgtgaataatagatactatcagaaaatttcataaaaaggttttccttatcaagagaggtggagggactggccctgcgatacccggcaaccgctgtttaacagaatggtgctaaatcctttagagcaatgattgctcttgaagataaggttgagattgtcacgcaagctcttccttatccaaaggaagagcttttttacatttgaatggaaagaaggaatggacaacatgtcacaacaaacaacacccgcagaacaaaaatcacttcaaagaaaaaaaccgccgtttcgcgcggatcaagtcggaagcctgttgagatctgagcccgttaaaaaagcgcggctgcaaaaagcggccggcgatattacggctgagcagcttcgccagatcgaaaacgatgaaattatccgcattgtggaaaaacagaaggaaaccggcctgaacgtcgtgacagacggtgaattccgcagagcatggtggcactttgatttcctggaaaacttagatggcgttgagccgtttactcctgagcaaggcattcaattccataacgtacagacaaaagcacgcggcattaaagtcacaggtgatatcgacttttcaactcacccaatgcttgaagattactcatttctccatagcattgccggtgacgcgacgccaaagatgacgattccaagcccgaatatgctgtttttccgcggaaaattggaaaaaggtgcatacaaaaacgactatcaccttttccagcatgatgtatccaaagcatataaaaaagcgattcaagcgttttatgacagaggctgccgctacctccagcttgatgatacagcgtgggccgttttcttatctgaaaaaggcttaaaacaaatcgaagcgttcggaacaacgcctgacgagcttcgccagctgtttgcgaaatcgattaacgacgcgattgcagaccgcccggatgacttgacggtaaccatgcatatttgccgcggcaacttccagtccacttggacagcggaaggcggctatgacgcagcagccgaaaccatttttgacggcttgaatcttgacggacttttcttagagtatgatgattcacgctcaggcggatttgagccgctccgttacgtaaaacggtctgatcttcagcttgttcttggcttagtgacatctaaattcggtgagcttgaaaatccggatgacgtgaaacgccgtatcgaagaagcgtcccgttatgtaagcttagaccagctttgcctcagccctcaatgcggatttgcttcaactgaggaaggcaacaagctgactgaagaacagcaatgggcgaagctccgccatgtggttgagatcgctaatgatgtttggaaataagaaaagaaaaaacacacttgattccctagcggagcaagtgtgttttttatgtcattgtgcggtgtagcccccatcaaggacgacagcctgcccagtgacgcccttcgccttctcgcttgccaaaaacacggcataatccgcaatttccttgacggaaagcagtcgcttttgcggcacaagcggaaaaatgacttgttcaagtacagagtcgtaagggacatttctagttttcgatagatcgctaagctgattgcgtacaagctgggtatcgacataacccggacagagcgcattgactgttatgccgtggggcgcgccttccagcgcccctacttttgtgagtccaatgacgccgtgcttggcgctattataagcggatttccctgcaaagccgactaatccattaacagacgcgatattaatgattctgccaaactgctgttttttcatgatcggaaaaacatgcttcattgcaataaagggggccgtcagcatgaccttgatcagctgttcaaaggtgtctgtcggaaactcttcaatcggagcgacgtgctgaataccggcattgttcaccagaatatccaagcggccgtattgtttttggatgacgttcaccgtatcagcaacttgcgcttcctttgtcacatcatacggaatggccgccgcgtcaaagccttcttctgcaagcttggaggctgctttttcacatgcttccggacggaggtctgaaacgatgacgctggcaccttcccgggcgaattctcttgcgatttcgaatccgattccgccggcagcccctgtcaccaaagcgacttgttttctcatgtcaaacaccttcccattaagaattgagtacagactggcttacagcgaaatcagcttctgttttttcataaacctcttcaattgtgacaccatcctgaagctccgtcagtgtcatgcggccgttcacaaaatcaaatacagccaaatccgtaatcagcctgtgtacgactttctggcctgtcagcggatgagagcatgtttttttcacctttgattcaccatgcttattgacgtgctccatgatgacaacgattcgtttcgccccgttgacgagatccatggcgccgcccatcccttttaccattttgccggggatcatccaattggccaaatcaccctgctccgaaacctccattccgccaagaatagccaaatcgatatgcccgcctcttatcatcgcgaatgactcagcgctgtcaaaataagaggcgcccgtcacttcagtgatcgtttcctttcccgcattgatcaaatccgcgtcttccgttccttccagaggataggggccaattccgagcaagccgttttccgactgaagcatgacgtgaacgccatcgggtatctcatttgcgacaagcgtcggcattccaatcccgagattcacattcatgccgtccttgatttcttgtacagcccgtttgaccattcgttttctcgcttccttcacttggcctcaccctttcccgatgcttgctgaactgttcgtttttcaatccgtttttcttggctcgcgccaagcacgacatgctgtacgtaaattcccggcgtatggatatgatctggatcgagctctcctgcttccacgatttcttccgcctcggcaatcgtgatcttgcctgccatggcggcaatgggattgaaatttctcgccgttttcctaaaaaccaaattgcccatggtgtccgctttccacgctttgacgatcgccacatcgccggtaatgcctcgctccagcacataagtccggccgccgaatgttttatgttcttttccctcggctatggaggtgccgacgcctgtcgccgtataaaatcccggtatgcctgcaccgcctgcacgaattctctcagcgagcgttccttggggaacaagctcgacctcaagctctccgcttaaaaactgccgctcaaaaattttattttcaccgacataggaagcgatcattttcttgatttgcttgttagccagaagcaaaccaagcccccagtcatcgactccgcagttattgctgacaacggttaaatcctttactccctgatctcttatagacaaaatgagctgttcagggatgccgcacagcccaaaccctcccgcgatcagcgtatccccatcatgaatcagtttcgcagcttccttgcttgatgacagcactttttccatattgatgcccctttcgttttcttctacactagaccagtcaggctgtaaatcgcgatcacagcaaatacggcagccgttttaatgagcgtgatcgcaaaaatatcgcgataggattgccggtgggtcaaacccgtcacggccagaagcgtaataacggcgccattatgcggcagtgtatccatcccgcctgatgccattgaaatgacccgatgcatcacctctggcggaatattgtaagcctgaatcgcctgtaagtattgttctgacatcgcgcttaacgcaatgcccattcctcctgaagccgagccggtgattcccgccagcgcagttgtcgtaacggcgccatttacaagcggatcggtaaaagtatgtgaaattccgctgctcagcttatgaaaccccggcagtgcggcgataatgccgccgaacccgtactcggcacccgtattcatagatgccagcaaggcgccgccaattccttcattcagcccttccttcaattgggcaaacacacttctccaatcaaataaaatcgttgtgatgatgccaatcactaaagcaatctccaccgaccaaatagcagctgctgaagaaatatcaagcctgccgaactcctttaatcctatggaagaaaaatcaaatccattcggataccactttggcaggtaaatggtaaaatatttattcactgcaccgacgagaataagcgggacaaaggcaagcgcgtgccgaatcgggcttttgtccggttcagccgcggactcaatcgattcaggagcaggagcattctgcgaatcaaaaccgccatagccttcgccagatgcctgcgcttttttccgccttgattccaaatagagcatcccagctgccagcacaatcactgcgcccatcaagcccagccaaggggcggcataaatgtctgttttgaaaaacgacgtcggaatgacattttggatttgcggcgttcccggaagtgcgtccatcgtaaacgtaaaagcccctaaagcaatcgttcccgggatgaggcgttttggtatgtttgcttcttggaacatgtttttcgcaaaaggatatacggcaaatacgacaacaaacaggctgacaccgctgtacgtcaagacagcacccatcagcacaatggcaagtatcgctctttttgccccgacaagccggacaattgttttcgcgattgatgccgcaagcccggccatttcaacgacctttccaaaaatggcaccgagcaaaaacactgggaaatacagcttaataaaacccgccatcttctccataaaaattgatgaaaaaaaaggaagcacatggcttggatctgtcaggagcaccgcgaataacgcgcaaatcggcgcaaacaatatgacagaaaatccccgatacgccgtaaacatcagcaaacctaacgccaatagaatgatgatcagttccacacacacatcccccgtttccgcgaactagaaagcgtttacaaaaacctgtccgcatcggctgtttccgtcccctttccatatgtacgagaagcgtgggccaactattccgattaaaaaaggaaagctccttttttcggagctttcctctgccattcatttcattcctattaggatatcaacatcaaccgtaatatcggctgttttcatctctttcaggaggctgactcgatctttcggcgccgaccaggcaagcggcgtcatcttgagaagccagtggatcgcctgctggtcaagcgttttaacatagcgcagcctgacaggacggctgtgtgcagcatttgctgcaaaacgctcaacagctgccgcattggaatacgtgcgccttggtgaatcagtatataaaaattgccttaattctattaaatagtcgcttcgcggcactacttttacgagcatgccatcattcttcagcagtctatgaaactctgcataattggacggcgaaaaaatagacagaacaacatcaaattggcgatcatgaaaaggagcacgcgccacatcggcaaccgcccacatctgatctttgaatgccttagaagcttttaagatcccatccttcgaaagatctatgccggttcctatcgctgctttccctgcataatcaaacccgcaaagcgcattcaaatgagaaccctcaccgcaaccgctgtccaggatggtgaatgcctcatgaccagatgtgggatgactgatgagttctgcaatcgcatcatggagcgggtcaaaaaaaccacattctccaatcagcctgctcctcgcttcaaaaagctcggcaccgtaactggttttgaccggcttcgtcagaaagttcacgtagccgtgccgagatagatcaaatgtatgtcctcgttctgtacaaatcaagcttttccctgatgccgcatccatagaagaatcgcagagcgggcatcgaaacatgctgaaatcaactgttcgcttcatgataaaaaacaccccattcattcatttttagataaatgaaaaaggcatagacaaataaacctaggcctatctcaaaaattggccaggtctggcagtttgtctacacctgtcattatctataacgaatgaattggataatcatgaaaaaactccctttctgctgtatgggtttccccatttccattatacaacaaatctccaggatctggaaccttatagtgaagaaaaatcagtactgacatgctggtatcccgccaacatcatatcagcatagcaatccagcatgtttttcctttattttctcattttagaatataaattttattattgtgaaaatagttaaaaaggttgattttcaaaaagtgaaaggataaaatactgctatcatcttagaaaaagacattcttgtatatgatcagtaatatggtctgattgtttctacctagtaaccgtaaaaaactagactacaagaaagtttgaataaatttgaacgagttgaaaaggacaagttcttttctgtttgctcttatttttcacactttctgcacttccagaatttgtgaagaataagagctttttttgtttccataataaccctcataggagttgctatcatgtactttttactaaaccttgtcggtctcattgtgattatggcagttgtattcctatgttctccgcagaaaaagaaaatcaagtggcgcccgatcatgacgttaattgttctggaattgctgattacttggtttatgctgggaacaaaagtcggaagctgggccatcggtaaaatcggtgatttcttcacttggctgattgcttgcgctagtgacggtatcgcgtttgcctttccgtcagtaatggcgaatgaaacagtagactttttctttagtgcgcttcttccaattatctttatcgtcacattctttgatattttaacgtatttcggcattttgccttggctgattgataaaatcggatgggtgatttcaaaggcttcccgcttgccgaaattagaaagctttttctctattcaaatgatgttcctgggaaataccgaagcacttgcggttatccgccagcagctaacggttttaagcaacaaccgcctgctcacattcggcttaatgagcatgagcagcatcagcggctccattatcggatcttatctttcaatggtgcctgcgacatacgtgtttacagccattcctttgaactgcttaaacgcgctgattatcgcaaacctgctgaatcctgttcacgtgccggaggatgaagatatcatctatacaccgcctaaagaagagaagaaagactttttctctacgatttctaacagtatgcttgtcggcatgaacatggttatcgttattttggcaatggtgatcggatatgtcgcattaacgtcagcagttaatggcattcttggcgttttcgtacatggcctgaccatccagacaatttttgcttatctgttcagtccgttcgcattcctgcttggactgccagtgcacgatgcgatgtatgttgctcagctgatgggcatgaaattagcaacgaacgagtttgttgcgatgcttgacttgaaaaacaatctcaaatcccttccgcctcacaccgttgcggtggcgacgacattcctgacgtcctttgcaaacttcagtactgtcggcatgatttacggcacgtacaattcgatccttgacggagaaaagtcaacggtcatcgggagaaacgtgtggaaactgctcgtcagcggaattgcggtatctttattaagtgctgcgattgtcggcctgtttgtgtggtagaaacattgagccatatcccttttcggatatggctcttttcattattgataaatagaggctggcacctgcacatcccggattcccgctgcataaggccccaagtcatactggccgaagacgatggcgatcccgtttgccgtaaagtaaaacattgtgtctctgtttagggttatatcctctttctttacatcagggaaaaacagctcatcgtgttttttgatatagctatataggtaatctctcgttttgctgacttttgttttggtgttcagaatctgatccagcgtcacccgcttttgtgctttcaagtcatagttgaaggactggacagacgttaaaccgtgggcgccccctgaatagatataattgagtgtttgaatgctgagcttgcctgccgcattgtatttgacgctaaaggatgtttgatattccgttttaaagccctgctgttcgcctgcttttttgtttttcaggtattcctgatacgattgttcaatgtaggctttcagctcttgattgattttcttttcaaacgcggcattcccgatgtgatgcacttgtggatacgttaactccttgatctttttgtacgtatgagtgctgacagtcggtgttttcgtttgaactgcgtttagagatggggccgcatatgcaactacggaaaaaagcaagactgcaatccccgcggctttcatcattttattccatttcatacaatctcctcctttgatgtcgttgtttatcattcccttatttaagcaatacacacttttatagactgattaaatcgaaagaagtttctaggtctaacagcatgatttttccaataaaaaaagagacacaggatgtctctttttttactgtttgcgcccaaaaatcgcttcatgaacggcctgtgccaaatctgtatttccgaacatctctaataccgcaatgacagtctggtccggaatgtgctctgcttcgtgttttggcacgaccagatcgtccatggtttttttcaagctttcattcagcttttgctgcggatacgctttggtgtacatctccaccggatcaagatcatggttcacgcaccattgggcaaacaccaaaatcatcatattttcatcgcgttcgtaagcttcagcgagctgtttttcgttcatttgtcatgctccttatgaaaagtatcttccttaaagatacaggagccgatcaaattcgtctatcccaatggcgatgagcagaaaccgcatcgataaatgccttgctgaaagcggtgtagtcaggttcatctttagccgttacgatgcctggcccctctgttgtcccgacagaggattgaagaaggtcaattccttcatttgccgcaccgatcgccttgtagtgattgtaagcttctctgataaactccatcgcttgtttgttgtcttttaactccggccctcctgcggcatagacggcatcatacagaacagaatcaaccgtcaggaacgtgccgctggcctcaagctgctgtccgctgccgcttgtcatataccccagattttgactgatgatatctactgtgattccttcttgctttaaggcttccagcactgtttgcagctctttttcatgaaatccgtttccggtgagtacagcgacttttcttgttgacgcggttttcactgtacgggcttggcttaacgcaggcgaagtaagaatttctttagatgctttacgcttcgcgggcgccgccacgcctactcctttggcgatttcttctgctaaatctgcatcgacattgctgaagacatcaacaacctgccgctgtacgtctttgcttttgaccttcccgacctcgaagcagaaagcagaaatgatgtgctgtttctccacaggagacatgctgttccagaaaagcttcgcctgtgagtaataatcgttgaagctgtcgcttcgctggcggatttttttgccctcgactttttcctgatagtggacgtagccgccttcttcagctgtcgcaggcgacggatcattgttttgcagtgagtttttatgataagcgacaggccccttattgatcgtcatccgatgataaccgtcatattgattgttatggaatggacataccggccggttaatcggaagctcatggaagttcggaccgccaagacgaatcagctgtgtatccgtataagagaaaagtcgcccctgcaatagagggtcatttgtaaaatcgatgcccggcacgacatttcccgggtggaatgcgacttgttctgtttccgcaaacacattatccgggttgcggttcagcgtcattttcccaatgatcttcaccggcacaagctcttccggccacagcttagtcggatcaagaatatcaaaatcaaacttgaattcatcttcctcatcaatcatctgcacgccgagctcgtattcaaccttgccgccgttttcaattgtttcccacaggtcacggcgatggaaatccggatctttcccggcaattttctgcgcttcatcccatacgagagaatgcacgccgagcaccggcttccagtgaaatttcacgaaacgtgcctttccttgttcattgacaaaacggaacgtgtgaacgccgaagccttccatcattctgtagctgcgcgggatgcctctgtctgacatcgtccacatcaccatgtgagccgactcagggttattggcgacaaaatcccaaaacgtatcgtgagcagtcgctgcctgaggcatttcattgtgaggttcaggcttaaacgcatgaaccaaatccggaaatttgattgcgtcttgaatgaaaaacaccggaatgttatttcccacaaggtcatagtttccttcttcagtataaaattttgtcgcaaagcctctggcatcccgcaccgtgtctgcggagcctttagaacccgcaaccgtagagaaacggacaaataccggtgtcttcaccgaagggtcctgaagaaatttggcccgtgtatattccgtcattggttcgtaaacctgaaaaaagccatgcacgccatacccgcgtgcatgcacaacgcgctccggaatcctctcatggtcaaagtgcgtcattttctcccgaaagtgaaaatcctccatcagcgtcgggccgcgaaccccggcttttaacgaatgctcatcctctgatactcgcaagccttgatttgtcgtcattttcttcccgctgttatcggtcctgtactgctcaagctgctcgtcctttgagtgttcatttacacgtttgttttggtcatcactcatgtctgctcccccttttaaaacgaaacattctacagcacatttacccgtggcgttcttcatataaactgctaatccgctcattaggatttttggtctacatataaatatgcggtcatacacatttgaaataagccttcttcacagaaagaaaggatggaagcgcttaccaaaaaagctgttgaataggggaggtcatatcatgcttgccatactcggttttgtgatgatgattgtctttatgtaccttattatgtctaaccggctttccgctcttattgctttgattgtcgttcctattgtgtttgccctgatcagcggatttggcaaagatctcggcgagatgatgattcagggcgttacagacctcgcccctaccggtatcatgctgttattcgccatcctgtatttcggcattatgattgactcaggcctgtttgatcctctcattgccaaaatcttatcgtttgtcaaaggagatccgttaaaaatcgccgtaggcacagcggttctgaccatgaccatttcgctggacggagatgggacaacaacctatatgattaccattgcagcgatgctgcctctctacaaacggctcggcatgaaccgtttggtgttagcgggaatagcgatgctcggttcgggggttatgaatattatcccgtggggcgggccgactgcgagggttttggcttccttaaaattggacacgtcagaggttttcacgccgctgattcccgctatgatcgccggcattctctgggtgatcgccgttgcttatatcctcggaaagaaagagcggaagcggctcggcgtcatttcgattgatcacgcaccgtcttccgatccggaggccgcaccgctcaagcgtcccgctcttcaatggtttaacctgctgctgactgtcgctctgatggccgcactgatcaccagcctgctgccgctccctgttctttttatgactgcgttcgccgttgccttgatggttaactatccaaatgtcaaagagcagcagaaacgaatctcggcgcatgcgggtaatgcgttaaacgttgtctcaatggtgtttgctgcgggcatattcacaggcattctctccggcacaaaaatggtcgatgccatggcgcattctctcgtttcactcatccctgatgccatgggcccgcacctgccgttgatcactgcgatcgtcagcatgcccttcacctttttcatgtcgaatgacgccttttacttcggtgtccttcccatcatcgccgaagccgcttccgcttacggaatagacgccgctgaaatcggaagggcctccttgctggggcagcctgtgcatctgctcagcccgcttgtgccttccacctatctattggtaggaatggcaggcgtcagctttggcgaccatcaaaaattcactattaaatgggccgtaggaacaacgattgtgatgacgattgccgcacttttgattgggattatttctttctaaatgtatgagcttgatcgtagcattgagtgagtacgtgatttacagaggggagaagatcaaataggatattatgagtgaatagaagattcatgccaacaacttctcattacaatcataagagcctgctatattgcagcaggctctttcacatttggcattatttttttgtatagcgcacccagtcataatgagcgtatagcggatttacaccattgtaggaaccaagccattcatcgacacccgtgccattccacaagttcatcatgatctttccaggtgttgtcggaatttggtttgttgcagtatgttttaattgcccgtcgacataccatttaatagagtttggctgccaatcgaatgcataagtatgataggcattggctgcatcaaacccgagatcaacaatcttctcatggtttcctgcaccatttgtataatagttaaattgaaccttcgttgtgtcttttcctaaaaattcgatatcaatctcatcccaaggagttccatctgttggacctgtgtaagtgaagaacgatgaaacgatccctgtgtttttagctggtttcattctgacttcataaagtccatagccatatgtttgaacagaacggttttccccgcagtcaaacttgttataagctgggcttgttagcgctaaacgcatttcacccaatgacgtcattgatacgttattagcccgccacgtgcagttgaacatatttccattcgaataaccatctgctttttgccaaaaaccggagttatagccgttaaaagggtcaaaaaacgatccacctgtttgagctgaggcagtagaagtgactgcaaacaaactcataaacaatccagtgacaagaagcagcaacactcgtttcagataaggcatattggcattcccctttcattgaaagcgttttctatgttgatcttacatgattcttttaaaagggaacatcggtcaaaataatgataatatcgaatcttactgacttgaatcctgtaactatcatcatcttccctctgaaaaaaataaaaacctaaattaccatcagcacagacagagatgatccgcactcattgtaatttaggttttgcctgctttatcagtaacaatcctaccattttcatatgtgaatgtaagaaaaaatgaatacaaggaaacaaaaatgtcagcgctctcattatgcttgtttaactaccctttctatgtgaatggttaaatacagcagctcgtcacttgtgagcttgtgctcatactcccgctcaatgtaggtttggattttcttcgtgcattcatacgcgcgatgatacttttctttcactgtatccagcaaaaaatcgtcctggctttccatgtgagtgccgttaaaaagacgctgcgcgaaaaactttaagtgggtgacgaaccgataatagtgaagcgattcttcgttgaattcaatcttaaaatggtattttacaatactcaaaatctcttgcatgacttttgtaatgttgataatattgggcatctcttcattcagctcggcatttacaatatgcagagcaataaagcccgcttcatcctctggaagagacacacctgtcttgtttttcaccatgaccaacgcttctttgccgatcgtaaattcgtctttatacagccgttttgtttcccacagcaaggcgtttttgatatcaagccctttctggttgcgctggatggcaaagttaatatggtcggtcagcgacacatagatgctgtcgttgagctttttgccgagctgtaattttgcgtagctgataatctcttcggatacttccatacactcgatcggtatatcatacaaaagggttttgaacttttctgatacatccttgttatcgagcgtgaacactttctcaatgcgggcttcatcgacatcatcgccggactttttctgaaacgcgagccccctgcccatgacgaccaattctttcccttgttcattgaccacgctgatcacattattgttgatcaccttcgcaattttcatgacatgtccctccaatcaactaagaacagactatatcttgattgtacattctttttgtactaggtcaatatcatcagggaaagacggaagctggtcagtacaattcactccgtacctgctgcccgggctgtttttgaagcagcgcctccagatggcgttcaaatgatgccttgtcagctttctgctttttgacaatgctgttcatgattttgacgctttcggcgctgtattgtgtatattgttttttcagctgatccagctgctgtcttgtcttcttcgcgtttttcggtgtgacttggccgatgagtttgatcatactgtctgcggtctcaaaaaaaacggctctattttctgtcagctgctgaatttcgatccggctcatgtcttgattacgcgttttttgtagcaaggcgaccgcctcgctgttttgttttttgagcgatttgttctcaagcttaatcgattcgagattctccttcgcaatgtctgcttcttcttcagtcatgttgcttcgcacgaagtattctggattaccgattccataatcaaatgcttcgctcacttgtatcatggaactgaacacaatggccagctgcctgtcgcttgcgagggcttggaaatcctgctttttcttactgctcatcggtttggctgcggtttgttttactgtcttttgatcacagtctgcgaacatctgagcctcaccttcactttcgcatgcgctcatcacaagaactgtgaccagcaggcttatacacaagcctattcgcctcatgctctgtctcctctctgctgaatcccttctggaaaataccataaaatatagttaaatggtaccagattcacctaaccccagcaataaatcaaaagtatgatttgaagcgcaaaaacataaatattttgtaaaaattgacgtgcattccattcttttcaggcccatttttcgtacaatagaagtatcgttaccggagagggggctctgatgatgaaacgttttacgaaacaagaaaacagctgggtattatatgactgggcaaattctgcttactcaattgtcgtgaccaccgcggtatttccgttattttataaatcagcagctgcggaaagcggtgtcagcgccgctcaatcgactgcctatctgggctataccattgcgatttcaacgtttattcttgcgatgctcggccctattttaggcacaatcgccgactatgaagggtgcaagaaaaagttcttcggtttctttgtgtcagtcggtgtcgccagcaccgcgatgctcgcctttatccctagtgaacattggctgctattgttgctgttttatacgatatcggctatcggtttttccggcgccaatgtgttttatgatgcctttctcgttgacgtcacgcctgagaagcggatgaatctcgtctcagcacggggttttggcttaggatacattggaagcacgattccatttatcatcagtattgctgtcatcctgctcgcacaagcagagacgattccagtgtctgtatcggccgcaagccagctgtccttcttcataacggctgcctggtgggggctgttcaccatcccaatgattaaacatgtccatcaacgctattacatcaaaaaagaacctcatattgtcatcaacagctttaagcggctcggccaaacgatgaaacggatcaggcaataccgggcacttttcctcttcttgctcgcttatttcttttatatcgacggagtcggcacgattattacgatgtcgacatcctatggatcagatttagggatcggctcctcaagccttctgatcatcctatttgtcacccaggtagtcgccgcgccgttttcgattgtatacggaaaactggcagaacgcttcacggggaagaccatgctgtacgtcgggatcgtcatttatatgatcgtctgcgtgtatgcctattttatggagacaacgcttgatttctggatactggctatgcttgtcgccacctcgcaaggcggtattcaagccctaagccgttcctatttcgccaagcttgtgccaaagcgccacgccaatgaattcttcggtttttacaacatttttggaaaattcgcctcaattatggggccgctgctcattgccgtgaccgcccagctgaccgggaaatcctcaactgcggtgttcagtctgatcattttgtttgtaattggtattgtgattctggcctttgttccggaggagaccagcgccgatgtcagccagcagcaaaatgacctgcccctttaactgggagcaggtcattcatcatttattcgctttattcaccttcagctttttccctttgacggttgtgttcttcatcactttgagaacatgagggcctttaccatttaagatctcaacgtatgaggcgttatccatgatcgtgatgatgccgatgtcgtcagctgacacaccgtcaattttggcaatcgttcctacaaaatcaacggctctgattttctttttctttccgccgttaaaatacagcttcataatgtctttattcagctcttcgcttttgtcctttttgctttccggacggtcattcagtttagctagaaattctggtttcttccttgccacttcctcttgagaaggtgcttctattttttgaatttcaaatccgatatattcttcaatgtcggctaaaaaccgtttttcgaaggccgtgacaaacgaaatggcctttcctttgttccctgcgcgtcccgttcggcccgtgcggtggacatagctttccttttcaaccggcagatcatagttgataacaagggagatattttcaatatcaatcccgcgcgcggcgacatccgtcgccactaagtaacggtactcgccacgtttaaattcattcatgacgtcgaatcggtcttcctgaatcattccgccgtgaattttatcgcatggatatcctaagtcatccaattcatcggtcagctgattgacgtgctccttcgttcggcagaaaatgatgcagctgtcgggattctccgtcatcagcacatctttcagcaatgaaaatttatgctcttctcttacttgaatcaccgcatgttcaatatttcttgtggtaagcccggccgctttgatttcgatatgctcggggttttgcatatattgacggctcagcttctcgatatcctgcggaagcgtcgccgaaaacagcatcgtcgtacgctcagtcggcagatgcttgataatcgcctccacctgctcaatgaagcccatattcagcatctcatccgcttcatcaatgaccaaataagagagacgatccaacggcagcgtgcctttttcgatatgatccagaacacgtcccggcgtgccgacaacaatgtggcttttttgcttaagctcagctttttgtttatcaaaggaggattttccaaatacggctgtcgctttgatccgtttaaatcgtccgatgttcgtgatatcttcctttacttgcaccgcaagctcacgggtcggtgttaaaataagcgcctgcggcttgttttcatcccaattcgccagctcacagagaggaatcccgaacgaagccgttttcccgcttcctgtctgtgatttgacgacaagatcctttcgttcaagggcagcggggatcacactctgctgcaccttggtcggttctgtatatcccagtccttccaatgctcgtaaaatgtcatgactgatttgatagtttttaaaatgactcatgtataaactcctgtctcttgcagatgttctcattatactctaattgaccaaggcatatgtgttttgtcgaaaaatgatgtattaaaagccagcgattccctggcgttttagctcctgaacagccaatcgcgccagtgcgtcggcccccgcgcgattcgggtgcagcgtatctccatccatataaagcccgagtgttctttccggaccgatcgatgtaaagtatgccgagctgaggacatttaagtcaatgagatatgttttttcctcttcggccaaagctaaaatagaggccctgtaccatctgtttacagacgaatggatgccttcagaagtaaaatcggttgcccggccctgaggcgttgataggatgacgtccgctcctttcgcttttacctgacgaatcatatcacgcatcatctctttaaactccgcttcagattcattatgcttcggatttgtgtcattaatgccaagctgcaatataaaataatctcccggtttaatatacttcaggatcgcctcaagctgtccatcatttctgaaccctctcgcgatctgcccgccggacgccatgtttctcacttgaaaggtgtgtttatcgatatagtgaggcagcatctgcccccagcccgcctgcttgctgctgttgagcggataataattgcacaccgtcgagtcgccgccgacataaatggttcggttcgtcaccggctgatcagacaatttctttattttcaaggcgctaagcgtaaaagcggtgccggctttcccctctgtcaccagtagattcagctgcccgtcggtgacaggaatttggaacgtatcctccgcgccatcccctgtcatattgatgacctgaaacacgccctccgccgccacactggcccttgccgtattgccaagcgtcgccttcacctcataaaggccgttcgggagatccacttgaaacgtgttattacttttcgtcccatacgctaaaaactgaaccgcatcactcttcactccagtcccagatgctgccacatccttcatattctctggtgtttgaaagccgtagccctttgaccggtcataccgattagacgccctgacaccaatataaccaggctcaaccgaaccgtttccaaagtcaaactgatacaccttctgctccgctgccttcacactctcattcccgtcaaaacccaacatcaacatcatcacaaaaaccgttgccatccattttttcatcaagactccccctctatgaaaacgcatacattaatgcatactcggtgattgtttctttatgatgactgaatgaagaaaaaaatggcgttgaggaataaaaatgaggggagagtctcaagaaggggaaaatcagtgtgacttcttgtcacacttgatcacatcccaacctccgcaatagaaactcatctgatcttcttgatcatacacataataacggagtctttcccattgatcgtcagtcggttcaatctccaactcaaccgcatcaatggattcaaggtcatccagccttgatgcactaatgtcttcaaaccgcaaatgaatgtcacaggtttgagctgatcgttttcattcaaacacaggaatatgaatataacgatcatcttctttcatatagaaagaaaactcgtttaatgtaaatggacctgtatcctcatcagaaagatgctttttcaatttctcgtattgtgtgatattcaaatgaattcctcctatttttagttacctccaaccatatagatctccgcagcatcgtattcaaaccatatgatccgttcgcctgagtccgttaggcattggagcttcccttctgaaaaatagcttttatccggttggggatcagtgatcagaaaaacatcatcattgatggaagctaacagaaagagaaaatctgcaatatcccggtctgcttcctgtaatatggattggaaatggaattcccttttgtccagcttcgtcaccttgtaagcatgaccttcaaaatactcggacaggtcttctataaatgaaccagtcgttattacctgtatcatgattcgatcgtaggcaagccctgcccaaaaacgataaaacgactctgcatctttaagttcgcatgacataacggtttggtcaggcttaagctcgatcatgtccaaattgccaatactgcttatagaggttatttccataaaatcttccccttatcagttggatagcgcaacgcaaatctcttgtctgacttgttcatacaagagaatatgatgatacagatccttatcgttttcgatcatatccggaagtatgtcaggatacagctcaaaaaagcttttctccaacgaacgccgctgttgccggggcatccttttattcgccagcacataatccaaactgccatcaacaagcataaaaaactcatagatttccgcttcaaagccgtacaattcactaggatacggcgtttcttcaagctctcgctgtctttttttcagtttttcaaacacgccgactctctcctccgacacatgttaaataacaaactaatctatcttgaaacaggataggcggatatttatctatcgcctccaacaggtcttcaccaaacacagtgattgtcaatttccacgggtctcccaaaagtccccaagagaagtcctgatgaaaaaagaaataatagtctccatttggaaatacgggaacaggccattcgccaaattcatcctgaggcattgcctgatgagggctaaacatatatccgtcatgctgccaatctagtgcgtacattacttcgttctttccagtacctaattgaaatgcttttaaaatagaagcctctaaatcactcagcactccactcacatcattatgaccagctttactgctcatcgcgcttgagatatcaaacactcgatatggctcaggcggaatgatgtgatgccatctgcttccgggtttccattttatgagcttgttcacttctgaccagatgcggtcttgttttgtctgacttaaagcgcgccaattcatcatgatctcatccctacacctattggatatcctgtttgtaaacaccagaagaggccactgcataaacagcgttacttgtcagtttcagctgttgaacgtctagggcttcaccgttcgagtcacagcatgttatctcttccatctcttgactcacatcggcagaaatcaaataaagagacgactcaagctcttcactgtaacaattgaacgtcccaaccaaaaaaccttcttcagatatcgcaagctgataaaatgcttctgagttcggctctttatccgacagaatccatacccgtctcacgaccgtgtcgtcaaacgcggcaatgactgcatctccgtaatacagcatataaatcaagccgtttttttctgcaagtccataacaatcatctacagccggcgcatccatttcttcgagctttctatcaaagtgtatttccttctgctgaccatccaaagtaaaacaccaaacactatgcccatcaggattttcatcatcataaatgccttcatcatttaaaccgacccaaaggttttgtttctcatccaaaagacagcaggaaacccctgaaggcaagtgaaaagcacttttcactcttccctcttctgaaaaaacctttaccttcggctcatacgattcgtaataaacgaagacatagccatctgcacattgttgaaagagcagaatatcactgtatgaaatctgctctttggctttaaaaacccgaatatcaccggaaggatcatagattgaaatggtcacatcatctttcacaccttttccaatgtagacacgccccagtggatcagcatggaaaaaacaatcttgggtgtccgtgttgatgactttattcatttttaattttttcatttgttatgctcctaggttagaaatgaagtgataattaagcatttattagctattagtaacggacagcctagtttcattaatcgttttgatataaagctactttccaattcagtcttaaagcatttagtatttaattggtatgcataaaacgattgatcatcaaagcgaactgtttcagcttcaatagcaatcagcattctgttcatgtcaataagaaagttagcatttgattgatactccggaattatataatttgatagattctcgattccttctggatgataactcatctcaaatacttgccaactgtattcttccggatctattttttccaatctcatgtcgccaacatctgcactataataagcggatgccacattttgaaatgatattttatgcgtatattcaccttcatcttcaaaaaccttaatatcaagtgagagttcttttttaaacacattaaaatctaaatgaagaacactgcacccctcatctatataatcaacccattcattaatcgtttgatacattgtcatcccctgcttctttttaatcaatagcgcctttccaccaagcagaaagcaaattactccgtatattgtttgatccaatcatttaaatcatctgttgaatgcaaataagtttcaggagaatctttcaaatcaattccgcttaaaaggattaacatatcccagactctaccgttttttactttagggtcatccgcataaatataagggcccgcccaatctgacacttcttctcttgttgtttgtccatttaagacacttttgattttatttatgcattctagtagttttggctcgatcaaattgatcaccacgcactcaatattcgtttggtataccgacaattctatttattttattaaagcctgctgagcaatcagatgatcaacagacaattcggtaaaagatcctctaccgaatgaattctattattcgctttgaagatccaaacaaagtatttaataaatgttattctcattaacaataattgcatttttatattcttctgctgatgttttcataaaagaaatttttttatgattaaataaagtattagtttttaaatttgcagagtatatataatcattactatcgctttttaataccaactaagttttcaatatattatatgctctattgttttatttttttcaagccaatcatagtcattaagagttgatatttcatcaaaatagtacattcacttttccttttactaattgagaaagctttttttcgcaccaagaatttgaaataactgtattattgatttaacatgttagcttcattggaataggattacaatatttttctggaacgtttatgttattttaagaatcaaaaaaaggccgcataggcctttttacattttccattattgcatttgttcaatatccgtaccctcagctgtcacattcgccttcccctgcctcctgacaagcgtcaaggccatgcccgcaaagatcattacgatgccaagcgtttgatagaggtcagggcggaaacctgtgaagacggtatcgagcacgattgcgacagcggggtcgagaaatacaatgattgaaataaatttcgttgataaaaatcgtaaactgtcaaaaaacaacaaatatacaatacccgtatggatgatgccggtagataccaccataatccagtttccctgagataggtcagcaaaagcgccaaagtgaataaacggaatcaggatgataacccctaaacccgtctgcaagaaggtggtcgtgtaaggactgagattgtgaatgccttttcccaataaagtggtgaacgcataaaacagtgcggcgagaactgcccatatgatccctgatcccatcagctgtgtcaatgaagtgctgccgttaatcccggaaatcagcgcagttcccagaaagcagatgataatggagctgacggagatcacatttaatttctctctgtagaggaagctacccagaagaagaacaagcaccggcgctagatgataaacggagatggcaattgtaacggacgtttcttcaaaagacttaaataagaacacccagttgaatacaagaaagaaaccgcacaccaatgtttgcagcacgtctctcttgctccatttttcagttttatactggccggacgccagccagcaaaggcctaaaaacagcgtcgcgcaaaggcagcggacaaagaccaattcaaatgacggcagattagtatgctctgagaaaaagccgatggagccgaaaatcaccatagagatgaccattttgattacggctgttgttgatttttgttttggtgtgattgagagatcttgctgcatcaagcgtattctacctccaattatgtatagggaaaagcaccccaactgcaaggtgcttttccttttttatagtttcttgccggccgtccagccgccgtctatgacaaagtttgaacctgtaataaagtgcgcctcatcagaagccaaatacttcatacaggaaacgatatcactcggctgcccccacgtatgaagggcatggttatctttgatcagctgaaccatttcatcgtcttgaaaatactcttccgttaattctgtttggatcacgcccggcgaaatgctattcaccctgatcccctttgatccgaactccatagcgagctgcttcgtcagtccgatgatcgcatgcttggaagacacataggcagcccgcgcaggctctgccatcagcccggacacagaggcgatgttgattatacaccctcgtttccccagctttgaccacagccttgccgcgtcccgagaaagaataaaggctgccgtgagattaatgtctatgacctttttgaatgattctgctgataattcaagaacaggggtaatttcccttatccctgctgcattgatcaaaatatccgggatcagccggcttttttcaagttttagcatcaaagattccgcctgccggacatcagacaagtctgctttttccatgtgaaactcactgtttactataaattctgacattttattcgtttgaatatccactccaacgactcgaaagccttctgttagaaattgctttaccgccgcaaagccgattccgctatttgccccagttatcattatattctttttcttcatcattttacattctgccttttttcactttggtaatttgtaataatctgaatattattatttgacaatatattacaaataatttagcattgcactacatcctctattttccacattttctatcatacaggaaattactaaaaaaaacatctactttttaaggagagattcatatggttcaagtttcaaacgtacaaaaagagttgacatccgatatttctaaatatgcttcttttttaaaggaaaacggctattcgtatatcccagcagatttctatcagcagaaaacaacagacgctgcagtccgcgaattacagcttacatatgatgatttgaaagctgattctaaaggaggcggccgttacagagcgcattcccgctacattttggctcctcactccgacactcttgaattagatccggataatggatatttccaatcaaaagaatataattatgatgatggcggtatcgtcagacaattcgaaaaaatatcagatgagtttctacagcatcctgtaacgcggcacatgatacattcaaatgtagaaatggctcgccaaaccgattttgtagattgggagaaagaagtgatcgtcgggcttcaccaagtcagatatcaagtgacacctgacgcgccttcatacagctcacccatttggctgcatcgtgacgatgaaccgcttgttttcgtccatctatttcagctgagcgaagatgctatcggaggagataacttaattgctccgtctgttaagcaaattgataaagtgctgcggctgacagacccgcttgagacacttgctctcgggcaaaaggtctttcatgcggttacaccggtcggcactgccaatagagatggtgcgcatcgagatatattattagttacattttctaacagataaaaaaagcgcccttgggcgctttttttacaaatctatcgaacaattaaaaccgggcatgttgataattgagacactttatggctgacgcttccaagcatcatttctttcaggccgctgatcccccggctgccaactacaatcaggctgacgcctttctcttttgcgtgatttagtatctcatgcgccggctcgccattcgcgtaaatggtttcagcttgaacgcctttttcggctgctttttcttttgcattctcaaggattttcaggccctcttttttaacctcgttcctgatttcatcaataaagtgttcaggcacatagacaattcccgtcagagaagaagtcgtgacgacggcttctctccccacatgaagaatgcttagttccgcttgttgctcttttgccaaatgcactgcggcatcaagcgcttttgcactcatgtctgatccgtcaatcgctactaacattttgttaaacatgctcttcccgcctttcggactgtgggtggttcatctttctcttttattgtccgcctgcatttcgttattgtcaattgaagcgcatgagttttcaaaaaattgtcagagactctctccgtttgtggcgatgacctgctgataccagttgaagctttttttcttgatgcggttaaatgttccatttccttcattgtccctgtccacataaatgaaaccgtagcgttttttcatttccgcagtagatgcgctgacaaggtcaattggcccccatgatgtgtatccgattaattcaacgccgtccgcaatggcttcgcgcgcttcaattaaatgatcacgcagatagttgattctgtaatcgtcctgaatcgtgccgtcctcttcaaccttgtctacagcgccaaggccgttttcaacaatgaacagcggcttctgataacggtcgtataaggtgttgagcgtgatgcgcaagcctttcggatcaatttgccagccccattctgatgatttgaggtaagggtttttgactccgcccagcaggttgccccctgattttgcaagctcttccggatctgtgctcgccgccatcgacatgtagtagctgaatccaatataatccaccgtatgttctttcaagagctcttcatcgccttcaaccatttcaatttcaatattgttttctgccagatagcgtttcatatatcccgggtatacgcctcttgcctgaacatctgagaagaaaagtgttttgcgctcattctccattgccgcgaagacatcctccggcttagaagtcatcggataggttgtcgttgccgctatcatacagccgattttcgaatcaggaatgatgtcgtgacccgctttgacagcaagagcactggccacaaattggtggtgtgccgcctggtacatcgcgtttaatttgttttctccttcttcaaaaacaagaccgcctccggtaaatggcgcatggagcactacgttaatttcattaaacgtcatccaatacttcactttgtgttgatagcgtttgaaaaccgttttggcatagcgttcataaaactctatgactttgcgattcttccagccgccataatttttcactaaaccgagcggcatctcataatgagagatggttacgacaggctcaatatgatgctttaacagctcatcaaacagatcatcataaaatctgaggccttcttcattgggctcctcttcatcgccattcggaaaaattctcgtccacgcaatcgatgtgcggaacgccttaaatcccatttctgcaaataaggcgatatcctctttataacgatgataaaagtcaatcccgttgtgatacagattcaaggaagtcattgattcatcaaatggagacatgatcccgttcggcgatacgtcagctgtcgaaagccccttaccaccctcgttataagcaccctccacttggttggcagcaactgcgccgccccataaaaatccttctggaaatcgtttttcatttgaactcatattgatcaccccattagttttttcaagataaagcaagcagcgcttcttttggctgcactttaccgatctctttcaccggcgaaaacgaatattggtctgtgttggtcacaatcaccggggtaatgacgtcatatcccgcggctttgatttgctccagatcaaaggacacgagcggatctcccggtgcgaccttgtcgccttctttgacgtgagccgtgaaccattgtccctccagcttcaccgtgtccaatccaatgtgtatgagtatttcagctccctgatcactcgtaatgccaattgcgtgttttgttttaaaaatggtggtaacgcttccacgaacaggcgacacaacttctccttcttcaggctcaatggcaaatccttttcccatgatcccggcagaaaatactccatctttgacttcacttaaggctttcacttctcccttaatcgggctgtgaatgatctctctgctgccctcatgcactgccggctgctggctgccgtcagaaggcacatcctcgaatccaagcaaatacgcagctgctgttcccgccgcaaacgcaatcacaaggccgatcatcgcgtaaataaacgttgggccgataaagacagggatgctcgggagacctgcattccctccgacgatataggaagcaacacccgtcatgccgtaaaacgcgccaccggctgcaccgccaatcaaagcggccgcaaacggctttttcaatcgcatattcacgccgtacatcgcaggttctgtgatccccatcagcgccgtgatgcttgtggtaagcgcgagtgatttaaattttttgtttctggagcgaaggaagacggcaaatgatgctcccgcctgccccatattcgccaaaaacatagccggcagtaaataatcgtggccgttttgagcgatgttgttgatcatgatcggcacaaaggcatagtgcatgcccgtcataatgattaaagagaatgtacccgccagcaaaatcattgccacaagccctgcatgatcaaacaaataattgaccccagaagacaagtattctcctaaaatagcgccaagcggaccgactgtaatcaatgtcagcggcacgacaatcaatagcgtgaatgtcggaaccacaatcaatttgagagatgcgtgtgtaaaacggtcaatccatttttccacgtatgaagcaatccaaatcgacagcaaaatcgggatgaccgttgacgaataagtggcagcggttacaggaagcccgataaaggaaatcggtttccccgcaccgagcagggctgtcaaatccggatgcaggatcgccgccgcaatggcagccgctacgtacggattgcttccgaattttctcgccgcactcatcgctagcaggagcggcaggaagtagaacgcaccgtcaccgacagccgtcaaaatgacatgaacctggctcttctccgccatccagccaaacgtaactgccagcgcaacaagccctttgatcatccccgctcccgcaatcgcaggcagaatcggggtaaacacaccagaaatcacatcaaagaccgcactcagcacattctttttctgagaggatgaaccagcgctcttttcatcactgagattgctgtgccgcacaatcgcctgatacaccttcggcacatcgtttccgataatgatttgaaactgctcgccgctgatattggtgcccatcactccaggcagctgctccaactgactgcgatccgccttcgaattgtcatgaagattaaaacgcagcctcgtcatgcagtggatcacgcgctgaacgttgtcttcaccgcctacgagttgtaatatgtccttcgataatttatcataatccatgtgtatacctcctttttatggggggactgctggaagaaaggtggccgcctttcaccagctttttttctatcaaatgctgcatcacctcctaaaagagaataaaaaaaacctaaatgacacagattgcgagagtctcctcctgcacctgcaccatttaggttttgcctgctttcacagtaacaatcctgacgggtcgttttatttgtttgtaggtatactttagcactagatttatcggatgtcaacgctttcatttttgagttttgactaaagggaattacttattgaggactgctttgttatagagggaagccattttgtatattttgttttatttttctgaaaatactatcaaatatatcagctgacttaatataaaagtaaaaaaccttgaaaggcaatttagcccatcaaggtatatgttttatttttgactatcccttttccatatactttctccgtcagttaaaaaaactgcacttggcggatcatcataaagtgaaatttcaactaatgaacctttcttttgtattaaccaattatataaactactttcttcactagtaggatgagctaaaatatcatttacttgaaatgtaactgcataatattcgataaaattcacatcatcgtcatccaacccattgtctgtttcaaagagtgtgtctggttcaccaataatctttaatccactatcccactctattatcaagtcactatctttatactcttttaacgcttttattaaaggatcatattccatgtatatcctcctcaagagaaaagtctctgcaatcatgccgtgagagtcagattctacagaggaaatcgcatgctgtgtttgtttcagtacttttttgtattcgtcgataaacatgccaaagaaaaggagaagggtttatgaattagctttataaaagattatttttattaaaaaaccttgaaaggcatatagccagtcaaggtatgataacaataacattatatttagaagtatcaactacttcacctactgatttatctgagagaatatcataattgttttatatattctttctaataaaataaggctattttaaagtaactccactccaacttgtttgcaaaatttaactttaagtctctcttcttgacccacattcattaccataactttgtcatctttttttatacttgttacattattaaaatcacctgtaaatactatagaatcattaaatgtaatacttagactactcgtttgcttatatacatctaaagttaaaatcaccttgaaattttggtcatctttgtaagtataaattaattctccatcatctatattgcctgttatactcaccggctcactttgaaaaagttctaatagatcatattcatcatactttataaacatttgtattcatccttttattaattatttcggtataactgtgataacatcgcctgcttcatttattattactttgacatccagtgtttcatgaacaaacgttccgcttctattaccaggtatctttttcgtattcattatagcgtcttcaataactgaaggtgaaatatttcttgggtcaacatattttttgataaaatcactaaattcttttgtttgtggtttatatcctaattcttcagcttttttaattgctctacttgttaaagtagcttttacttcaggaatatcaggtgccattctttccaaagcatgctgagaatactttcttccatttatttctcctccgccttttgacatgttccaaccaatttcacccttacccttagaagcaactttattaacctcacccttactttccttctccgcaacatgtttagccacatctgtgacaacacgcttcccgcctcggaccgccaattttttaatagcgccctgaggacttacccactcaataaattcatattgagttccggcaagaaacgaatcaattggcttagctccgcctactttatcctctggtatgtaagacacttcttctagccgctttttccctccagcatagaattctcttacgatctggccgttttcataaacataatatttgccgccgacatagtcgatgcttgcagtattgcgagttagttcgtcaatcacttctatcgtatctatcttttttaatcttttattattatatagtttatcatttatcacccgtatgtctccatagactttcgggtgagctgctgcttctttctgtaatacagttacgttactgtcatcagcatgaatctcacgctcgatcttctgttgtttgccatccttcatcacgatatcaacgttggactgcttatgtttctctattttcttcagcatcatctccatcggtgaatcatccggctgcttcatttgcgagttaatgccgccgaaggtttggttgatgttttcttcttcctgtgatttcaggatagagccgcttttgtagcctgtgatttcaattttcggaccggtatacatggttccgagctggtctatatattttttcatcgtttgaaaatctgattttgcggtttctaatgcttgggtttgctggccgtcaaattgaaagagcttattcagggtgtctgaaatcagccgctcagcctgttctgtttccatccgaaaaaaggaatcattgactgtcggcaggctgacgatgtgatcgatggctgatgtttggcgattgactgcgtcagtgagctgctctgtcacttctcgtgcatgcttgaccccatgtctcgcatcgtgtgagagaaaagcctctgcgatcatgccgtgggagtcagattctacagaggaaatcgcatgctgggtttgtttcagcacttttttgtattcgtcgataaacatgccaaagaaaaggagaaaaggcttgtggcactcctcgtaaaaggtccggatggcatctccgccttttcctttcagcgcatccctcatgcctgccagatgctcaacgcttttttccagcttctccagctgttgtttttgcttgtccagtttctcaatcgtatgctgaatgccctcgtgaagagcgtggacatctaatgttttcaatcccttgtcctcccgcgctttatttcatggaagatgatatgttttcgtccgtttccttcatggcgtttaccgcgctttccgtttgtgcgatatgcttggccagaacagacgcatatgcttcagtgagctctttgatgtccttatttaattgctcgatggacttcacaacattcaaatggtttctgcctgagagatggccgggtaaggaggacttgagttcagctgaattcttgagctgagaaagcccttgcttcactgtgccatacaccattttaatttcctgtgccatttgtgctcacctcactttttatgtttttctttctctatttcatgctctatcctcgtaatttggcgtcttatggaatagacatcgccctctaatgagtggatttttccttctatgctttcgatgattccgttgacttgatcgcttttgatttgctgatatgctttgttcattccttcacgaatatcttcaaaccgctgagcatgtgttcctctccatgcctcccggttaagatgaggccggtgaatgagatgctgggcctcggagaattcgtgtttgatttgcctgatttcgtgcagcactcgttttaattgatggatctgttcctgcttttcatgtaagtcggcttttaccgaatgtaacaacatttcactatgcatgccgcaacacctcgtgtttctatcaaactgtgtcaattctttacaatacagactattttcatattacatgatgggtcatattggataaataggtaaaaaggattgtcttgaggaactttataccggttctaaatagctaaaaattcaatttcataactttgtaagagggagaatcatcatattggggacttttcgtttaggtcttgaaccccgcaatcacttctgttttttctctcgctcaaccatttcttatagtcaataaagctcataaaaaagcgccttctctagaaggcgccttctccatcttatttagatccccatacagcctcaccgttgccattcaaaacactaaacgtcatgacgttcttctctctcaccgaatcccactggcgtaaaaataccccgttatacttcttgccagctaacgtgatgtcgactgtgttttttccggttttctgccatgttccggtcatttccccggaaatggtgtggtttttgttgagctggataatgatggtttgtttgatgtcggctgagatgtcttttccgtgctggataagtttgtatgttcctgtgatgtctttttgttttacttctttcaatgtttcgcccgcataacgatatggtgctgctaccggccagccgtctttgttcatgaacaattggtggactctgacttcgtgttcttcacccctgcccgggaagcgggtgtggaagattaaataggaacgcccggttttttcatcatagtatgcggagttgtggcctggtgagacgtacccggtgcctttttcattttctgtttcaaaagtgtagctgcccatgagtttgacgccgtatggttcgatggaacggtcgtcgaagaatgtgccttctttgccgcggacgtcaagcattggattgccttctgcatcatagtaagggccgtctggtttcttggagcggaccacacggatgttatagccgcctgttgcatcaagaccgccatatgataggtataagtagtagtatttggtgtctggattgtagagaacatacgggccttcgattctgctatggttgccgccgagcagttttttcccgtatccctgtccaggaagcgggaagcccgttttcggattcatttcaagtatgaaaatgccgcctgagtatgatccgtacaccatccacagcttgccgtctttatcaaagaaggtatgcgggtcgacgacattcggatgtttggttgcgtcatacggtgttccatcgttgcttgtgccttccattcctgatttcaaaaagatgcctttgtttttgtatgggccttcgatgttgtcagcaacggcaacacccatggcggatcttggcgaatcgccgcggcaggcgttgtagtacatgtagtatttgccgtccgccagctgcgtgacgtcagccgcccaaagagtatcggattgcgcccattcgaaggtttcttttaattctttatagacattcgggataagtgggttgtcattgcttacgctggtggtcagctgctgccattgcatgaggtcattcgatttagctgaagcgagatgagatccaaaaacataaaaagtgccgtttgtttcaatgatggaagggtcatggacgctgacttctttaaatataggtttttgtgcatagacggagtttgggagggtgaaggccatgataagagctgcaagaaaacatacacagaacaatcggttgaacatctaaacaattcgcctctcttttttattaaattttaaacgcttacatttccctatgaagataccccggcctattaaaacagccgaatgttttcatattcaaacagataggtgatttctcactgttctcttacatagtcagactgatgtctgtctgttttgcgcagaactgctgcttgcatacctctattcatagttcaacccttttgccgtttctccttcttcaattacttctgtttcttcatttgcgtacataatgaacgctttgtccggtcttgtaaagtcgtcgacttttctccggcaacttcgcctctttttggcattttacctctcattgtcagcaatatgacagcggccgcttgcacttctgtctgggtatgcgtgtgcaatgtgctgctttctgcgtcacactattacaatagcaatctaacttgttaaagactgtaaaaaaccttttgacttctgctgctgaaccaattaatataatactcagttaatagttatcagaatttttaggaattgagtgattcatatgacactgcataaagagcgtcggatcggccggctgtctgttctcctgctgctgaatgaggcggaaaaaagtacgcaggttgaggagctggagcgagacggatggaaggtctgtcttggcaaggtaggatcaatggacgcgcataaagtagtagctgcaattgaaaccacttccaaaaagagcggtgtcattcaatctgagggttatcgggagtcacatgcgctttatcatgcgacgatggaggctttgcatggcgtgaccagaggtgaaatgctgctgggatcgctgcttcggacggtgggcttgaggtttgccgttttgaggggaaatccttatgaaagtgaagcggaaggcgattggattgctgtctcgctttacggaacaatcggggcgccgattaaaggtcttgagcacgaaacattcggtgttggaattaatcacatatgaaacagcccatagatcttagacaatagggggctatgcgtgaaaacagatgttcacagcatagctcctttttgtatgggcgctttaccaaagtaaagaaaaaggagttgggcttatggtgactttagacggttcttcattgacaacagccgacgtcgctcgtgtgctgtttgattttgaggaggcagcggcttccgaggaaagtatggagcgcgtgaaaaaaagcagagcggcagtggaacggattgtacgcgacgaaaagacaatctacggcatcaacaccggatttggcaaattcagcgatgtcctgattcagaaagaagactcggcggcgctgcagctgaatttaattctttctcatgcctgcggagtcggcgatccttttcccgagtgtgtgtccagggcaatgctgcttttgcgcgccaatgcgctgttaaaaggcttttccggtgtccgcgctgagctgatcgaacagttgcttgcttttttaaataaacgcgtccatcctgtcatccctcagcaaggatcacttggcgctagcggagatttggcgccgctttcccacctggcgcttgcgctgatcggacaaggagaagtcttttttgagggggaaagaatgccggcaatgacaggcttgaaaaaagcaggtattcaaccggtaacgctgacatccaaggaagggcttgccttgattaacgggactcaggccatgactgcaatgggggtggtcgcctacattgaagctgagaaactagcctatcaaacagaacgcattgccagcttaacgattgaaggtttgcggggaattatcgatgcatttgacgaggatattcactcagcacgcggctatcaggagcagatcgatgtcgcagaacgaattcgcttttatctatctaacagcggcctgacaacctcccagggagaactgagggttcaggatgcctattcattgcgctgtattccgcaagtacacggtgcgacttggcagacactaggctatgtcaaagaaaaattagagattgaaatgaacgcagctacagacaatcccctcattttcaatgacggtgacaaagtgatttccggcggaaactttcacggacagccgatcgcctttgccatggattttctgaaaatcgcaatatcagagcttgcgaatatcgcagagcgccggatcgaacgacttgtgaatccgcagctgaatgacctgccgccgttcctgagccctcatcccggtctgcaatccggtgcaatgatcatgcagtatgccgcggcctcactcgtttctgaaaataaaacactggcccatccggcaagtgtggattccattccgtcatccgccaaccaagaggaccatgtcagcatgggaaccatcgccgctcggcatgcttatcatgtgatcgcaaatacaaggagagtcattgcgatcgaagcgatttgcgcattgcaggctgttgaatacagaggcatagaacatgcagcgtcctatacgaaacagctttttcaagaaatgagaaaagtcgtgccgtccattcagcaggatcgtgttttttcctatgacattgaacgcttgactgactggctgaagaaagaatctttaatacctgaccatcagaataaagaactaagggggatgaacatatgactgatgtaaaaaaatcaatccgtgccaacagaggaacagagcttgaatgcttaggatgggagcaagaggcagtgcttcggatgcttcgaaacaaccttgatccagaagtcgccgagaagccggaggacctcatcgtatatggcgggattggcaaagccgcacgggattgggacgcttttcacgccattgagcattccttgaaaacattaaaaaatgatgaaacattgctcgtgcaatccggaaagcccgttggcatgttccgtacacacccgcaggccccgcgcgtgctcctagcaaattctgttcttgttccgaagtgggcagactgggagcatttccacgaacttgagaaaaaagggttaatgatgtacggacagatgacggctggaagctggatttacattggctcacaaggcatattgcaaggaacctatgaaaccttcgctgagttggcgcgacagcacttcggaggcagcttaaaaggaacgttgacgctgacagcgggtctcggcggaatgggaggcgcacagccgctgtctgtcacgatgaatgaaggcgtcgtcattgctgtcgaggttgacgagaaacgcatcgacaagcggatcgaaacaaaatactgcgatcgaaaaacagcatcgattgaggaagccttagcttgggctgaagaggcaaagctggcaggaaaacctttgtccattgcacttctcggaaacgcagctgagatgcatcacacaattttgaaccgaggcgtcaaaattgatattgtgacagatcagacatctgcccatgaccctttaatcggttatgttcccgagggctattcccttgatgaagctgaccgtttgcgtcaagacaatccagagctttacgtgcgccttgcgaagcaaagcatgaaaaaacatgtcgaagccatgctggcctttcagcaaaagggctctattgtatttgactacggcaacaatatccggcaagtcgcaaaggatgaagggctggagaatgccttcgattttccggggtttgtccctgcctacatccgccctttattctgtgaaggaaaagggccgttccgttgggcggcgctttccggagatccggcagatatttaccgtacggatgcgttattaaaagagctgttcccgacaaataaagcccttcaccgctggattgatatggcacaggaaaaagtcaccttccaaggcttgccgtcccgtatttgctggcttggatatggagaacgaaaaaagatgggcctcgccattaacgagctggttagaagcggggagctaaaagcgcctgtcgttattgggagagatcatttggactgcgggtctgtcgcctctccaaaccgggagacagaagcgatgaaggacggaagtgacgctgttggtgactgggctgtgctaaatgcgcttgtcaacacggcggcgggtgcaagctgggtttctttccaccatggcggcggcgtcggaatgggctattccctgcatgccggcatggttgcagtggccgatggaagtgagctggctgacgagcggctcgcgcgggtcttaacgagcgacccaggaatgggcattatccgtcatgcggatgcgggttatgaacgtgccgttgaagtagcgaaggaacaggacattatcgtgccgatgcaaaaataaaggagtgatgacatgccaaagcaaattgatacgattctcatcaacatcggtcagcttttgacgatggaaagcagcggtccgcgggcaggcaaaagcatgcaggatcttcatgtgatcgaagacgctgttgtcggcatccatgaacagaaaattgtgttcgccggacaaaaaggggctgaagccggttacgaggcagacgaaatcattgactgttcgggacgccttgtaacgcccggcctcgttgatccgcacacccatcttgtatttggcggatctcgtgaaaaggagatgaaccttaagcttcagggcatttcatatttggatattctggcgcagggcggcgggattctgtctacagtcaaggataccagggcggcttcagaagaagagctgctgcaaaaagcccattttcatctgcaaagaatgctgtcctacggctcaaccacagcagaagtgaaaagcggctacggcttggaaaaagagacagagctcaaacagttgcgtgtcgcaaagaaactgcatgaaagccagcctgttgaccttgtttccacatttatgggagcccatgcgattcctcccgaatatcaaaacgatccagatgaatttctggatcaaatgctttcccttttgccggaaatcaaagagcaggagctcaccagctttgctgatatttttacagaaacaggcgtttttacagtcagccaatcccgccgttatttacaaaaagcagctgaggcaggcttcggattaaaaatacacgcagatgaaatcgatccgcttggaggcgctgaattagcaggtgagctaaaggccgtctcagccgaccatttggtaggtgcatcggacgaaggcataaagaaattggctgaggcaggaacgatcgccgtcctcttgccgggcacgacattttatcttggcaaaagcacatacgctagggctagagctatgattgatgaaggtgtatgtgtcagcttggcaacggattttaatcctggcagctcgccgactgaaaatatccagctgattatgtccattgccgcgcttcatctgaaaatgactgcagaagaaatttggcatgcggtcacagtcaatgccgcatacgccatagggaaaggagaggaagccggtcagctcaaagtcggccgctcagctgatctagtcatttggcaagcctcgaactatatgtatattccgtatcactacggggtcaatcatgtacatcaagtcatgaaaaacggaacaattgttgtcaacagggagggagccattcttggataagtacccttttctcagagaggccggatcttcgtttaaagaccgggatgtcacaaaaatgagcgacctgatcgcaacatgggacggccaggacattaagggaccggcgttgataggtgtccccctatcaaaatcctccatcagtcattcaggcgcttcctttgcacccggaacaatacgccaggctctgaaacattcatcagcctattctgctgagcttggagagcatgtcgtatcagagcttctatatgatctgggggatatcgatattcatgtcactgatatcgtaaagtcacatcatcacattttccaaaccatgcacgctctgctttcggaccatcccgattgggtgccgctcatacttgggggagataactctatcagctactccacaataaaagcgatagcacaaacaaaaggaacgacagcagtgattcaatttgatgcccatcacgatgttcgcaatacggaggacggggggccgacaaacggcacccccttccgccgccttttggatgaagagattattaaaggccaacatttgatccagctcggtatcagagaattcagcaacagccaggcctatgaagcatatgcaaaaaaacatagcgtgaacattcacacgatggacatgatccgggaaaaaggactgatcccaacgataaaagagattttgcctgccgttcaagatagaacagatttcatttttatatctgttgacatggatgtcttagaccagtcccatgcacccggctgtccagcgattggcccgggcggcctctatacagaagaattgcttgaagcagtcaagtatatcgcacaacagcccaatgttgccgggattgaaattgttgaagtcgatcctaccctcgattttcgagatatgacaagcagagctgcagctcatgttctgttacacgcattaaaaggaatgaaactctccccattcaagtgatcttctggcaggttgtattttgggtataagaaactcatctgcctaatgaatggcagctaaaaggagggcgagacagtgaatcttcaggagaacagcagccaacagctaaaacgcacaatgaaaagcaggcacctatttatgatctcattgggaggcgtcataggcacaggacttttcctcagtacgggctatacgctacatcaagccggacccggcggtacgatactcgcttatgtaatcggcgggttgatgatgtacctcgtcatgcaatgtctcggcgaattgtcggttgccatgccggtgaccggctcttttcaaaaatatgctacaacatttattggtccatctaccggttttatggtcggcatcatgtactggatcaattgggtggtgacggtaggctctgagtttaccgcatccggtattctcatgcagcgctggttccctgacagcagtgtatggatgtggagtgcgatttttgcagcccttctttttatatgcaacgcattttcagttaagttatttgcggaaactgaattttggttttccagcgtaaagattgtcaccattattttatttatcattctaggaggagccgccatgtttggcctgatctctttaaacggaacggcggatgctcctatgttgtcaaacttcacggaccatggcgggctgtttccgaatggctttcttgccgtttttatcgcgatgatatctgtgagttttgccttttctggtacagagttaatcggcgttacagcaggagaatcagcaaatcctcaaaaggatattccgcgatccatccgtaatgtcgcatggagaaccgtgatttttttcattggcgctgtcttcatattatccggattgatttcgtggaaggacgcaggcgtgattgaaagcccttttgtagccgtatttgcggagatcggaatcccttacgctgctgatattatgaatttcgtgatattaacagccttgctgtctgtcgccaactcaggcttatatgcttcgacccgtatgatgtggtcgttagcaaatgaaaacatgatcagctcccgttttaagaaagtgacctctaaaggcattcctttaaatgccttaatgatcagtatggctgtatcttgtttatctctcgtttccagtatcgtggcccctggaactgtctatgtggtgatggtcgcaattgctggatttgcaggagtcgtggtctggatgagcattgccttgtcccaactcttgtttcgaaagagatttctgaaaaaaggggggaatgtaaaagatctgacatttcgcacgccgctttaccctcttatgcctatagccgctcttttattatgctcagcttcttgtattggtcttgcttttgatcccaatcaaagaatcgcacttttctgtggagttccttgtatcatcctttgctatctgatctaccatttcaaaagaaatgtttcaaaagcgaaaaaaatcagccaagaggaatatccggccgatcacatcctgtaattaaaaaagcacaccccgctcaggatgggatgtgctttattttttattcagtaatcaacgtatgaatcagcttcggcgccttcgcttccgcggcgaggcggatgttgtcatagacttttgcgatgacttcatcgacgttttcgcggttggcgtaaagcgtcacgagcggttcgcctttttctactttgtcgccgacctttttgtggagcatgatgccgacggctaaatcgatctcatcttcttttgtggcgcgaccggcacctaacagcatcgccgcgacgccgatttcgtccgcaacgatttcagagacgacacccgcttctttggcaggcacatcaatttgatatgcggcttgcggaagcttagacggatcgtcaacaattgagctgtcgccgccttggtttttcaggaaatccttgaatttctcaagtgctttgccgtttttcatgacttcttccagcttcgctctcgcttcgtccaatgtatcggcttttttcgcaagcacaaccatctggctgccgagcgttaagacaagctcatgaagatcctcgggtccctcgcctttgagcgtgtcgatcgcttctttgacttcaagcgcatttccgatcgcaaagccgagcggctgggacatgtctgaaatgacagccattgtttgacggccgacgttatttccgatgcgtaccatcgctttggcaagttcagctgcgtcttcttctgttttcatgaaggcgcccgctcccgtttttacgtcaagcacgatggcgtccgccccggcagcgatttttttgctcataatcgagcttgcaatgagcggaatggaattgaccgttcccgttacatcacgaagcgcgtacagttttttatcagccggcgttaaattgccgctttggccgatgaccgcaaccttgtcgcggttcacaagtttaataaattcatccttcgtcagttccacgtggaagccgtcgattgcctctaacttatcaatcgtgccgcccgtatggccgaggccgcggccggacattttggcaaccggtacgtcaagagccgcaacaagcggagcgagaacgagtgttgtcgtgtcgccgacgccgccggtggagtgtttatccactttaattccttcaatggcagaaagatcaatcgtttcaccggagttcaccatagccatcgtcaagtccgcgcgttcacggtcactcatatcctggaagaaaatcgccatagcaagcgcgcttgcctgataatcaggaatgcttccgtctgtatagccgttcacgaaaaattgaatttcttcagtggtgagttcttttccgttttgttttttgatgatgatatctaccattctcatgtttggtcaccgatccttttcgattaagttcagtaaatcaagcccacaattgctgctgataaaaagctgacaagcgtagcaccgtataataatttcaagccgaaacgagcgacgacatttccttgcttttcattcagtccttttacggcaccggcaatgattccgattgaggagaagttcgcaaatgacacaaggaataccgatacgatcgctgttgtacggccgctgaaatggaaaccgttttgcgtaagcgacgtcatggcgacaaattcattcgataccatttttgttgccataatgcttccagcattaacagcttcattccatgggataccgacaagaaaagcgaatggagcaaacacatatccaagaatgccttggaacgaaataccgaatactgcattaaaaatgccattgatcaaggcaataatcgcgacaaatccaatcagcatcgcagcgacgacaaccgctactttgaaaccgtcaaggatgtattctccgagcacttcgaagaaggattgtttttcttcttcctcaacacgaagcatatcctcttcttttgcaacctcgtacggattaataatagaagcaattatgaaaccgccaaataagttcaagaccagcgctgttacaacatattccggtttcagcatggtcatatacgcgccgacaatcgacattgacacagttgacatcgcagatgcgcaaagcgtgtacaagcgctgctgatttaaaagaccgagttctttcttcaaggagataaatacttctgactgccctaaaatcgcagaagccactgcgttatacgattccaatcttcccataccgtttaccttgctgagggcaaggccgatatatctaatgataaacgggaggactttccacttttgcagaatcccgatcagagcggaaataaacacgattggcaagagaacattcataaagaatgtcgtttggtccgcattcaccaagccgccaaacacaaagttaattccctcagccgcgtattcaagcagataaccgaatccttttgcaaatcctcccacgagaaaattccctatcccggtattgaggagaatgtagccaagaataaattgcaaaatgagcataacaacaattgggcggatcttaattctttttttgccgctgctcgcgatccacgcgaggcctaaaaacacgattaaaccgataatcccaatcaaatacttcatatgtgtttctcctttatttgtattcgcttacaatcactgtttcctcagaaaacggaaagcagtctgccttccgtcagctcttaatagttgtctccgcctgatgcattttctccttttacgatagaaacgcctgcgctggcgccaattcggcttgctccggcctctaccattgtgtctacatcttctttcgttctgacgccgccagatgctttcacgccgatatcaggtcctactgttttgcgcattaaggcgatatcttccttcgttgcgccgcctgtagaaaagcctgttgatgtttttacgaaatccgctcccgcagacaccgctaaacggcatgcacgttctttttcttcatcagtcagaaggcacgtttcgataatgactttgacaagcgcttttccggctgcagcttccactacaccgcggatatcagcttccaccacatcgtcttccttgtcttttaaagcggcaatattaatgaccatatccacttcagtggcgccttttgaaatggcgtcttttgtttcgaatgcttttgtttcagttgtattggcaccgagcgggaagccgatgaccgtacaaacgtcgactccagttcccttaagctcttttgcagcaagctccacccatgtcggattgacacatactgaagcaaatttgtatgttttcgcttcttcaattagttttagaatgtccgctttttgtgtatgcggtttcaaagctgtatgatcaattatgttggctaatgacatccttcgcacacttccttttttgttaagatattttttagcataaccgacttttgaacatatgtaaattggtaattgaaattttgttcaacgaaaggtttgaacgtgtcacaaatcattaacaagcgccctcgcggtatgctggtcaatgattaaaacgttggcatattttccggttaatgctccgtgaatggaagatacttttctgcttccgccggcaactaaaatggagcgttccttcagcctgaggtcttcaagctcaacaccgatggtccggtcattgatggcgctgctgcaaatattccctttcgcatcaaaaaagcgtgaacaaatatcccccacggcctgttttttcagcagggctttctcttcttcgttaaaatatccgagtcggaacaacagcgcttcatcacggacagtccccaccgtgaagagagcaatattcgcctgctttcccatctcgatgatccgctcaatatgacggtctttctccaccattcgcttcacatccgcattatcaaacacgacgggaagcggaagatagcgcggcatcgtttgaaaagcctctgcaaacagctgaatcgtttcagccgaatacgtgtttacccgggaatggctgatgccgccttttagctggacgacctcgacgccttttacctgcttcggttgcatgttttgcgcgatttgatacatggtggttccccagctgacgccgacaatgtcgccgtcttttaccgtttcatgcatatattctgcaccatagcggcttaggtcatgtgtaattcctgcataatcgggtgtcggggaaaacacaacatgcgcctcaaggagcccgtatttctcttcaagtatggaaccgagcgcatccaaatcctcaaaagggtccatgacgcgaatctggacataccctttttcctttgcatattgcagcagccgggaaacggttggccttgaaatgttgagctgctcagcaatttgctgctgactgtagtcagactgatagtaaagccttgccgcttctatgcttaattgttgtttttcccgatccattccgcacctccctgtggatcagtcctgataaaactgcttttgatttgcttttattatacaggctggcgccggctttcatccacctgatttctaagaaactgaaaaacgctctgggcgcggacctgcccagagcttacttctcccaagtcatatgctgataaatgcctttcataatggcgtacattccatataggatcaggcctaatgccaatatagacagaatcaatttgccatgcggctgctgcgcgagttcggcgagcgcgccgtcaaagcctcttgtgtcgtcgggatcagcggtcatggctgtcttgatgagaaaatagccgatggctgagaaaataatggcgcgggcgatattgcctgcgcgcccggtgtttttcgtgatgcatatcatctgtttgttcatttttgatgtatcgaattctttcataaaagcagcccgaacgcctttcataaattgaacaatcgcaaatacgataaaacccgcacccgtaagccctgtgagccatcggccgaatggctgcgccaatacataagcggaccacgtctgttctgaagtgccgccgtccccttggccaaacacaaatcgcaaggcattccaagcgatggatgtgtaaacggcggcactgaaaaagtttcctattctccgtgacaggcctcgcctgctatttccgtgcccctccgtgtccttgatcgcacttaacaccatccagattacatagccgataaggccgatgcctattaaaaaaagcaatagtgacccatacggcatgcgtgatagcgtttggagagctccgctcgaatctttggcgcggcctgccccggcagccgtcataaaagccaaaaccccaagcagaataaaaacgccgccgaatgcaaaataaccaagcctcccgaatcgtttgatccaaggcttggtttcctgttttatttttgacatgtaccggtctttcaccgccatgtgtccaaccctctttcacagaaatctttactgtaacattcccgattggacaaagttgaaacagcttctgcctcagctatggctggctgagatatgtttttgctgtttagctgattgtgcaggtgtcatccaagcagccgctgcggcagctgtgactccgcctgctaatttcccaatgatcatggccgccgccatttcttttttcattccagccacaaaaccgaggtggctgccgagtacaaaagcgccgctgaccgcaaacgcgacattgatgacctttcctctcggcgtcatatcctttaatgaagccagcattgggatatggtgcgccaaagaggtcaccaagcctgcagttgctgtctcatctaaatgaaggcatttccccagagcctgtagcggttttttaaaggtttttgtaataaaagccgtcattggaaacgcccctgccaaggcaatggcgatggtccctgttgtttgtatccctgtctcgacattctccattcccggaatcagcacaataccggtcatcgtttcaacggagacagctgcaagcccgataatcgcaaccacactgaccgctttcccgaagagatgaaacaactgaatcatactgtcggtgtatcgccataacccaaaagcgatcacagcagataacagactcgggatcagaaggtttttacctatcatgccgatgtcaaagcctgcgcataatccgccgattaagcaaccgatcggcactgtgcacagcccgattaatatgcctttcgcaaaatacggatgatcctctttttcgatgatgccaagagcgacgggaatcgtgaagacgattgccggtcccatcattgttcctaaaaacacccatgaaaacagcccggcctgcggatctttcgccatttctccagccagcgcatatcctcccatatcaatcgccaaaatggtgttcgcaaaggaagaagggtccgcgccaatcgctgtgtaaaacggagcaacaatgggaatcaggattgctgccagcacgggcgccagcgacacaattccgatcatggacagcgccagcggccccatagccttaaagccgtccgcaaaccgctcgcctagcccccatctgtttcccaaacaataatccgccgctccccatagtaaaaaggcagccaaaatgaatacaaccgtgtcattcaccgtcatggttttctcctttttcaaacgtatgattggttttatcatatcatctgaaatcaccgaatagagttgatcttattcaatatgagctaaaaattcttttatatcggctttttcaacggctgttatgatgctccgcgctttttcttgcgggaccgttaatgtcaatttttctattatgtcttcttcagacagctcatttcctggcgccccttttgggcagtccacacgcgcttcgcaaatccggccgtctgataaataggcccggacaatcgtgaaacggccttttggaacggcatgaggagccggctgaatagcattgtcatatacgcgctgaattcgccccattgtcgtttgaaccccgcttgggatcggctggctgctgaaatgttcaacggtcaggccgtgtccatgcaaagcaagagcaatcacatattcaacgctgaaacggccttcctctccagtttttggagatctttccgtcaatgcagcatctccgcctggcggaaatatcacttcaatacgttcggtattggcagcagaaatggtttcttcggagataagctgtcgtaccgcatctgcagcatggtgtgccgcggaacaaaatggatagattttaaaccatagacccggctgcacaattctccacggtgccccccaatcgtttagcaaagtgtgttgtgctttctcaacgtcaccgtacagactgaagaaaccagtttctccatcaaatgccgtgcgggacccgccaaattctgattgggccagcttaacggccagcaagccagcctgagccgccaaaccggcgtgcagcggtttcatttctgttccaaattgcaccctcatcccagcagattgcgtagccgcaaaaccaattgctttttccagctcttcctgagtcagctcctcagcataacctacggcgcaggcagcagcgatggcaccaagcgttcctgtattatgccagcccttttcatagtggcggctgccaattgattctcccagccgtgccatcacttcaacaccaacaatataagcgccaagaagccgctcgtcatgtccgcgagcggcagatgcaataagggccggtacgatgactgcactggggtgtcctcttacatcggagtggacatcatcaaaatccaatgcatgggcgataaatccattgagcatcgcggattgtaatggcgcggcctttttgccctgtccgataataggaacaaggggcaggcctccttcatcctctatcagacggaggagcttttgaattcctttatcttctcttcctgcgaatgaagcggcagtaaaatcaagtaatcccttttttgcttcgtgaatcgcgtcaactgaatgctcaggttgtgacgttctcacagcctctgcaagacctgctgtcagcccttgtttgctcatttgatggtctccaatacaataaccgccagctccgcaaagtattgagaggcaaccgtaagggcttcttcatccagtgtaaaggccggatgatgccactcctccgtcccgttcgttcccatccagacaaaaaatcccggaatcttctcttgatacagagcgaagtcttctccgcccggagactgctcagcgtgaacggtttgatagccaagccgtgccgcagcttcggatgccgcattcaaaaatgtgccgtcattctgaacggaaggcaaataaggaaaccacttgaattctgcttgtgccccatagcccgctgcaattcctttagccactcgtctcatatgctcgggaacagcctgcctcgcttctttttgaaaggttcgaaccgtcccttccatttcagcttggtctggaatcacgttccacgacgtgcccgcctgtactcttgtgatactgacgactgcgttttgcagtgagctgatattgcggctgaccacagattgcagcccgctgatgatttgtccggctgcagcgattggatcaatactgttatttgggatgccggcgtgtccgcctttccctttgatgacgatctcaaaccggtcaacacttgccataagcggaccttcctttacaccaatggttccgacaggcagatccggcttattgtgcatgccgaaaatcgcggaaatgccatcaagtacaccagcttctatgacctttcttgctcctgcggcaatttcttcggccggctgaaagataaagcggactgtacctttcagctcggcctttctttgattcagcaacatcgctgtgccaataatagaagcagtatgaaaatcgtgtccacatgcatgcattgtgccatcaaccttagatgcaaatgggagattcgtctgttcttggatcgggagcgcgtcaatgtccgctcgtattgctatcacggggccgtcttcccgtcctttgatttctgcaatcacaccagtctccaattgaggaacatcaagtatttcgatttgctcctcctcaagccagcggcggatttttttcgtcgtttcaatctcttgaaatgacagttcaggatgttcatgaagatcacgccgcatattgattaaacgggtatgaaacgttttgtcggccattgttcttctctccttcttatataagctctgcaggctctcccacctgcttgataaatcgtttcgtccgttcgtttttcggatggtcaaacaattcctctggcgttccctgctcgataatatggccgtctgccataaaaatcactttatcagcaacctcttttgcaaacgccatttcgtgtgtaacaatgatcatcgttgtttgtttttccgcaatggacttgatgacctgaagcacccctgtgacgagctcagggtcaagcgctgacgttggttcatccagcaaaatcgcatgcggattgaccgcaagcgcccgcgcgatgccgattcgctgctgctggccgccggacattgtgatcggatagctatcagccttatgctccagaccgacttgtttcagaatctccattccaatacgtttcgcttcgtcgcgtggtttatgttgagccacgattaaagcttctgtaatgttttgcagagccgttttatttttaaacagattgtagttttgaaagaccatggccgtttgctggcgaagccgatatgcttccttgcgtgtaaacttttccgcgttcagtttggcttctccgatttcaataagtccttgatccggacgctctaataaatttaagcaccggagaagcgttgactttccggaaccggacggaccgatgattgccaccacttctccgcgtttcacttctagatcgattccgtcgagcacgacgagatctttaaacgctttgcgaatattttttactgttatcaactgatttcacctctaagtccggtatggcttgctcatggcacgttcaaacaagtcctgcaacatgctgtagatcatggtaagaacccaatagacgatcgcaaccgccaagtacgtctcaaaatatttgaggtttcctgaagcgtacatcttcccttgggcgaacatctccatgacccctaatgtaaaggccagtgacgtttctttcaggagcccgataaatgtattgcccgttgccggaatcgcatttcggatcgcttgcggcaaaataatccgtctgtatgcctgaaattttgtcataccgacagacaggcacgcctccagttgcccgtcatcaacagaattgagggcagcccggaagatttctgccaaatatgctgcattttttaagcttaacccgatgatagcggctgtgagagctgtcattttgctcatctctggaaatagctgcggcagcccgtaatagattaagaacagctgcaccagtgtcggtacgcctcggaaaaaggatatatacagctttgacagctgatgaagcactggaattttgttctttgtaatgagtgcgagaataagtcctccgataatggcaaaaatcatagctgctatggccataaacaacgtgatcggaagggcctgaattaaagtcgggaacgctgatatcatgaattcccaatcaatcgtgttcattctggtgagtcaccgccgtttcttaatgcttctgttctactgtgatatcttcattaaagtatttttcagagagttttttcagtgttccgtctttacgcaattcatctagcgccttattgacttttttgcggagcttgtcgtgcgcatcgtccttggcaaatgggaatgcaacctgttcgtaaacaatcggatctcctgcaagctttaatggcaaaccggtcttcttgatttgcgcgatcaatacagttcggctgttgacataagcgtctacacggccgtacgcaacatccttcagcgtaccctcttgtgtttcgtacgttttgatattgatttttttatcaggatctttgctttcaaggtttttcgcgtggtttgaaccgagaacggctgcgactgtcttgccttttaaatcgtctactgatttgatgtctgtattgtcttttttgacgacaatctgtgttcccgcataagcgtatggtttcgtaaagttatacgtttccttacgttcgtctgtcacagctacctggttagaaatggtgtcaagcttgcctgtttgaagctcccccatcagcccgctgaattcaagcagcttccagtccagtttcatgtcaattttcttagcgaccgcttccatcacttccacgtcaaaacctgtcagctttccgttttctttataagcaaatgggtaactttgtcctgtcgcaccgacatgaagcacattgtcatcctctttactgctgctgtttccattgccgcaagctgagagcaccgctaataatgcagcaacgaccagcacaatccattttttcattttcatttgattttcccgccttttctttttttatagatcatgtcgcaattgttttttcatatagactgtgatatgcccttttccaaggtcttgttcacctgagcggacatacccttttcgttcgtacatctctatcagccacggatgcttatccgctgttccgagtgagacaaacggaacctttaacgtatcgcgaaggattgtttcctccagccattgaagcagctttgttccgattccttttttaccggtgtcggggtccacagcgaaccaccagatatgcggaacgccatacggtcccggctgttttccccaaggcattctcaaggtgatggtcgcgatgatccgcccgtcttcttccatgacgtagcaagcgtttttccgaatattttgcagcaccaaatctaaatccgcatgagcagcagcaaaacgaatgccaagctttcgaatcggttcataagcccgcaatgtcagcgcgaggagctgttcagcatcacgttcaactgcaaggcgatattgtggcttcatctagcgttcctccttactttgcatagcggtttaccggcttttccaaaccgaagtgctctcgtaatgttgtgccttcatattcttttctgaacacgccgcgctcctgtaaaatcggaactacttgatcaacaaacacttcaattccttctggaagaagcggaggcatgatgttaaacccgtcacacgctttcttatccacccattcctgcatcttgtcggcgagctgctccggcgtgccgacgaagatatggtggcctctggagcctgcaacgtatttgtaaagctctcgtatcgtcatattgtccctttcagccatttcctgaacaagcttgaagcggctcttcaccgcattagaagcttctgcgtcaagcttcggcagcggcccatcaagcggatatgccgacaaatcaattccgcctaagtaattttggagaatttgcagaccgacagatgggataatcagatcttgaagctccttgtatttggcttgcgctgcttcttctgtatcggcaatgattgggaaaatacccggcatgatggcaattttttctggatcacgtccgaattccgctgcctgttctttaatggattgataaaattcctgagctgattccaggtggttttgtgctgtgaagatcacttctgctgttctggcagccaacgcttttccgtctcctgatgatcctgcctggataatgaccggctggccctgcggcgttcttgaaacgttcagaggtccgcgaaccgagaaatattctcctttgtggttcagctcgtgcattttttctttgtcaaagaattcacccgtttctttattacggataaaggcgtcctcttcccatgaatcccaaagcccctttacaacttcgacaaattcctctgcccgctgataacgcaaatggtgttcaaggtgcttttcaccgctgaaattcagcgctgttgattcaatagatgaagtgacgacgttccatccggcacggccgttggacagatgatccaatgacgcaaactgtctggcaatatggaatggctcgctgtatgtagtggaggctgttgctgtcagtccgatttttgatgtgacctgcgccaaagcagagagcagggtgaatggctcaaaccttgttaatacatttggatgtgatttgctgtcaattgaaaggctgtccgctaaaaacagcatatccagcttgccccgctccgctgttttcgcaagctctttaaaataatccaaattcatgctcgcatctgagggcgcgtccgggtgccgccaagacgcaacatgatgacctgtacctgctaaaaatacccctaatttgatttgtttctttttgcttgtcatgacgatactccttttatcatgtttttaggctgaataatccgaaaaataaactcctatattcctagtcgtttaatatgaataaatcaaaatgtacctttgtcttggacgtttgtcaatgagttaagattaattttttctattcaagcgaaaagacccttgcgtgaccatgagggaacggcattgattcattcaactagtgcaacctctatatcggcaagaaaactgagtctaatgaagcaaagactcagttttcacccaagaattttatataagatttcgccatttcctttgccttttcttcgcttttgcaaaccgcctatccattcagacgccgtaacgattgtataaaaaaacagctgactccagatattcaaacgggaatcagctgattgatgtgaattaattaagctcatgaatactttcttctgctttagcagaaaactctttaggctcaaggcggtctaggtcttcatgaaataaactcactttttggatttgccgattgtcatagtggtggaaatagtagtttccagtttcgttgcacatcacggaagtatattgcgtataatgaatttcgtcttcttccgttatcactgcgccctttggtatcgtcatatttgccaaaatttgaaaagcggctgttacacctttcgtttcatcggccgccggctctagatgttctttcaaataaacagctctgacaaaccgggaaggcggtgtataatcccccggcagaccaacagttcctaagccttggccaaaagcagaaagggctaatccgcccatctctttgctctctaattgcttcggtctgattcctgtatattgctgcagattggttacatgccatataaagtcggggctgttcgtcatgacaccaggttgattatcatagactttgaggccgtctgctcttggttctatcgtcaggcttcggcccgtccggtctgacaatatccagtgaagcggtaaaactgtatccaatagatctaattttttctctacaatcgttaaagatcgaatcttttcttttacgtcttccaaagactgacagactgacagcacccatgtcacaaactcatgcgggacaatgtgaacggtatcttcccgtatcgttttttcgtactccgcatagcccggaaaataaagcgccgcacaagataaaccgctttcattaacgccgtcggcaaataatatatttccaagttttctccccataccgataaacgcgtactgtgtctgatgggcctttccgtcagcttcactcttccagctgtaacggcgcggatagagaatgacctccgtccccagctgaaatgcaaaatccattgttctcgctaataaatgattccggtcagcagtttccaatgtaagacttgtgcacatttgatcagtccccttttcaattcagattaatatcatacatattgtgaacgaattggttttatcagcataacgaaagtcaaatcgattcgtcaaagaattgacattacatcaaataaaacgaaaaaatccagccttctaagaggctggattttttattatttagccaaaacaagctcgtgaatcgcatgtgcaacgccatgttcattattggagcgcgtttgaaagtttgcggcttccaatacttctgggatggcgtttgccatggcaaccccgcagcccgcccattcgatcattgtcaggtcgttcccgttgtcgcctatgcacatgacttccgcctgttcaattccaagcagctgtgccagctggcgtacagcatttcctttgctggcttccgagtgcagaatttcataaaagaaaggcgcacttctgaccattgtatatttttctctcacttctttcggaatcgatgtaatgacgcggcttaagttctccggtttatcaataaacatcactttcgggatgaggatatcttttggcacctcgtcaattttgcggaaatgaagcggcacctgtgtcacataggattcgtatacggtaaattcgctaatgtcccggttaggcgtatacaaattagatgagtcaaagaaatgcatcggcgtcttcagctctaagctcaggtcatataatgaagccaaatcatcataaccgagagacagctctgagaccacttcatttgtatgcgtattttgaacaagtgctccattatacgcaataacatagtcgccttcttcaattaaattcagttcatctaaatatctctgcacacccccgataggccggccggtgcaaagcacaattttgacaccttccgcttttgccgcgtgaagggcgtcgcggacctcctctgttacttcatgatgatcatttaaaagtgttccatccatatcaattgcaattagtttgtacatcctgcatctccttcatgtcgttttcaggctatagtcccatcatatcgttttttctttttgatattcaaccggaagagatggttttctccggattctgtttagacgccgcccttgtcttcggatacgcaagcgcggtttccgctttctttctgccttgacgccgttttctgcttttttctgtttcatcagcagaaagccggcagctagaaaaggaatgccggttatattcaagatggcaagcttcacacccgccgcgatgaaaaagaacccccatgaagatgatggattccgtctgatcatgacgtaagccgccatttccagaacgatcaggatggcatgaagcactatgccataaatcagcaatacaagggcaaaaaacaaaacataattcacgattgcccctgagtacatcatagcgcgcatcatttgtataaacgataaggactgcatggagccgctgatgacattagggttatagatcgtatagtcactaaataaatgtttgactttgagaaaagcccataatataaatatccattgaatgatatgtaaaacaagccccgctgccaccagtctttcagctttttgatttctcatctttctcctccctgccggtctttgattcgattcttgtcatcgtttttctctgtccattttgctcccatatcaatgtcccgttttctcctcttttcagcgtgcttttgagcggataataggggccgaggtactgaatctcgatagacccgtcagtgctttgggaaatcaccttgtatgccataaaaggcagctgtacctctcctcttccttcaatcacttccgtttccacaacctcgtcttcggtaaatgtgactgttgctgatttcacaccgtccgttggcccgggggcacgcccctcatcccacgttccgtaataaaacggcgtctcttctttttgctgctggcagcccgataccatgatgcatacagcaattaaaaacaaaatgccatatttgtttctcaaggggatcaccattctttcctccttttttgggcgaatgccgtgccactgtgccaatgactacataagttataaggaattcacccacaaggagactgatcacatgaacccttatcaatattacagccctcagctgcctcagcaggaaccttactatagccactatgagtacaatccttatccgcagcaggatgtatacgatccataccaaatggacagacagccggcattggaaagaagaatcgcagcacttgaacggcaaaatgaacagcagtcaagagaattaacccgtctgacaaacgaagaccgccgtcaaaatcgggaaattgcacggattgccgaacaggtcaatcagttaagccaggctgttgaacgccatacacgccgcctaaatcggctcaatcagcgcctccgtacagtagaaaaccggctgaatatcccatttactgcaggggaaggcggtttctgagcgaaacaaagaaaaaaagcggaatacgattctcccatctcagggtttcgttttccgcatttcttatatgttaaaacggaacatttacataaaaagggtttgtacccagtatacaatctttaccgttttcattcaaagatagaggggctgaggaaaataattgtagttcctctttgacggaatttcttttcattcaagttgcatgataataccgactcacgtcaatcgatacatggagggatcattcatgcataatacacaacacggcttgcagcagctgaaccaatgccgccaaactgctcagcagctcattcagcaaacacagcaaagcagccagcaatatcgccaaatgcttcatcaggaacagcaaaacatccaaatgctgcagcagattctaaaccacgaacaacaagctgcacataccattcagcaagcactgcacgggcatgatatggcgattcaaaagtgccagcaggttgtcaacatgtgcaaccaaatgcaacaggaacttactggacaatccagcgtcatgaatacgaatgtgtctacacttccattcggccaaaacacgccatttcagcagcaatcctatcagcagtaacatataaaaagctcaacacaatgcgagtgttgagctttttttcttactgttctttgcgaatatgtatatcctgaatagactgtttcggtgcatgaaatctgctctcggcttcacttcttgcctcggcaaaagcccgcgcctccacatgatctttgtagacatccagctgaatcaaatacagcgggcgcactttaaatccatgaataatggtcaccgcccataacgggaccacaataaaaacaccgggcagatcgggcaaaacaaaaccaaacgcaaaaatgaaaaaataaatgatgccgtacatgatccactttctatttctaaccttgatgccaataaataaaaaggcaaaaaaactggtaatggcaaaaggcatgaaaataaacagcatccaccagctatgcagccattcccaagcggaacctctttttgtaattcccatatttttctcctcctatttacctataataatcgattaggcataccgcgtcacccataaacgggaaaaactttctcccttaaaaatagtgatagacggggaacaggtttcttgctatattattaattgataatgataatcattactaatctattgagatacatagtgggagggttcttgatgaaaaagaacatattgctcgtgggcatgcttgtgctgcttctcatgtttgtcagcgcttgcagcggcacggcttctaaagggagctcaagcgattctgcttccgaaaaaacagaagtgagaacatacaaatcaccaaaagggaacgtcaacattcctgcacatccgaaacgcatcgtcactgatttttatgccggtgaattgctgtctgtcggggccaatgtggtcggctcaggctcatggtcatttgataatccgtttttaaaatcaaagctgaaaaatgtgaaggatgttggtgatccaataagcgttgaaaaagtgatggagcttcagcctgacttaattgttgtcatgaatgaagagaatgttgataaattaaagaaaatcgctccgactgttgtcataccttataacacagcgaaaaacgtagaagatacagtcagcatgttcggagatatcgccggatcgaaagacaaagcaaaatcctttatggctgactttaacaaaaaagcggaagcagctaaaaagaaaattgccggcgtcattgacaaagatgcgaccttcggcatttatgaaaacacagacaagggcgaattctgggtgttcaatgacaatggcggacgcggcggccaagctgtatacaatgcacttgggttaaaagcgcctgaaaaaattgagcaagatgtcatcaaaaatggagagatgaaacagctctctcaagaggttattcctgagtatgccgcagattatatgttcattacggattacaacccgaaaggcgaaagcaaaacactcgacaagctggagaattcctctatttggaaaaaccttgatgctgttaaacataatcgcgtgtttatcaatgactttgacacgttctacccgtacgacccgatttctgtcagcaaacaggtggatatcatcaccgacatgctgatcaaacgggccgaagaaaataaaaaataaaaaaacggcacagtcatgacgctgtgccgttttttatgattcactttaattttgattgtacggagtccggcatatcttcaaacttgacttcttcccaagtctcgacatactttcctttcgccttcaccttcaaatacgcgttcttccgaagctctttgccggcgaaaaaggtcacttcttctttttttccggatgcattatatccgtctaatgtatattcagtaccgcccggactaagatgtctgccatctcgatcaatctgaacatagacatcttgctggtgaataaacggattaaatctgtctgtaacatcgttatgaaaaaagagaagcccgcatattacggcagcagccgccaagacggccaggattgccattgcttttttcatctttgcactccccttacttgttcatttttttcaaatagcttgaccgcaccgcgaggaagaatagaagctgaaaaatgaaaaaccctccgatggtgagactgagcggccccgcgacatcagaatagccttccacagccaatgttctcaaggcaaacagtgtatgcatgacggcaatgacaaatggaaagaagaaaagaatggccaattgtattgtcacgctttgtgccatttctcgctcactcagaccgattttggccagtgaacggtagcgctcccggtcttcatctaaatcagtgaacagcctgaaatataagaaacttgctgccgcgacaaagaatacaattgcgataaacaggccgataaataaactcaggctcggcagctgcaccgtatcatagtaagtcccggcttttgaagcaaaatcagaatgcacgtcgatataattgccgtaaatctcattttgcaaggattggctgatctcaagactgtctttccaatgatcatagctgtagccgtataatgacgcttgatcaccgagtgatttcagctgatcaaaggtttgatcattcaccgcgatgatagcattcaatgagatcagcggttttttgacttcttttaccgacagtttttgatcagacagctcccctttttggttcagcagcttcagctgatccggcgcttcgtttttgaaattgcggtcatacgttcccgggaaatagacagcctcgtcttctttcaggccgttcactttgacatggaagtattttgccgcatccgattcactgatcatgtaaacagggggaacagtttctccttcctgatagcgaacataggaaacatctattttgtctttcttatacgtaaagccgtgtgttttcagttcatggtcaatatctttcaaatgagtctgttcttttggattgttgctgtaagataaatactccatttcataagcggactcttccgctccgacggtcgatttgtacattgcgagcacgcctgtcgcagtaaacgcaaccgcggaaataatgctgacaataaagaacaggcgggcgttgtcttttagacgatagacaaggtcagaaacccaaatgatgtttttcccgcgcagataaaaggttttccacttcttcagcgcgcgcagaatccatatgctgctttggctgaaaaagaaatatgttccgataacggtgagcagtaaaatgataaacggttcggccccgtggacattgcctttaagaaccatgccgtacccgccgcacagacaggcgatgccgaataaggacagaagcacggacggcttaggctccggtttaaccttgccagtgccctttattaatttgataaccgtatttgatctgacaaaaaggatcgtaaactgcgataaaaagaaaaataagagcagaaatccgcaggccgtaataccgagcgctttccaaggcatatacaaaggcagcgcgtccatttctaaaatataagcgccgaccgtaaagaacgtctttgaaaaaatgaatccaccgattatgccggctgcaattgacatgacgccgatgatcatattttccgcagtaatgagctttctcagctgccccggcgtgatgccctgcatgagcagaatgccgaattctttatttctcgatttcaaaaatgcattaaccgaatacagaacaaataagaaagaaaaaacaaagatcatccattccgcggcggttaagccttttttggcgatgttattcaggtagccttcctttaatgccggatgaaacaggaacatcgcaaaggtaaagaaaatcaaaacggaaaaggcgctgcttaaaaagaatgcaagataagcccttttgtttctcgtgacgtttttataagcgaactgaagaaaggtcatttgcgtttccccccagcatagacagcacatcaagaatttgttcataaaagacttggcggttttccccgcggtaaatctcattaaacaattcgccgtcttttataaagatgacgcggcggcagtagcttgccgaaaccggatcgtgggtcaccatcaaagccgtgacatgatcatcccgattcaggctctgcaacgtttccatgacgtcttttgtcgctttggaatcaaggtttccagttggttcatcggccagaatgagtgacggcttatgaatgaccgctcttgcgatggcggcccgctggcgctggcctccggatacttcaaacgtccgcttgttaagcaggttttcgataccgagctttgccgcgatgccgtgcagtttttcttccatgacagacggcgcttctttttcaagcgttaacggcagcatgatattttcaccgatcgtcagcgtgtctagaaggttgaaatcctgaaacacaaatccgagctgcttgcggcggaaatgagcgagctttgtccgcttcaggcgatgcgggttttctccgttaatcaggatatcgcctgaatctggacggtcaatcgttgaaatgatattcaaaagcgttgtttttccggacccggacggccccatcaccgccgtgaactcgccttcttctattgaaaatgaaatttgctttaaggcctgataggacacttgtcctttataggttttatttatatgtttgacttcaagcatattcgccatgaaaatcctccttatggttttattcttgttgatctgggctgctttcatgtagtgccgggacgttcaacataaaaatccccttgacataaatccatgttatcaaggggaaacaaagcgggctatgttgttttcttaacgcagccttacatttttgtaagaaatgaaaatcgaactgatgtcccttcaccgggagacgagctgatgtccaccgtatgattgagcttatctgtaatttctttgacgagatggaggccgattcccgtagattcttggaaacgccgcccgttttcacccgtgtaataagggtcaaacacccgcttgatgtcttgtgagggaatcccgacaccgtaatctttgacttcaagcaccgtcctgtcttcatcgcggaagacattcagctcaagtctgtcactcttgcccgctgaatacttgaccgcatttgtgaccacttggccgatcgcaaatttgagccatttggcatcggtgtaaatctgatgatcatcgcaaacgttcattttcggataaacgcgatattgaataaaaaatcgtttatagctttgaatgactgattggagaagctcggacagggaaaccgcttcgattttaaaatcccgttcaaacaggtcgagccttgaagaataaagaagcgtctccagcccgaattcaatctgccggacttcttttttgatttgttcaaaaacgggctcatcctcttcttgaatgattaaattaatgaccgacagcggcgtcttcacttggtgcacccattgattcatatacgtcacccgcgcgtcaagcttggcttcggtctcatggagcttctggtgctgcagccggatcagctccatctgcttttcatacagctctgaacagaacactgaagaaccgagatacgggatatccgtcccttcctgccccgagctgagccaatgatacacgccgcggtctttgtaccagcgataggcaagatagcccgccaaaataagaagctgcacgcccaatatgtaaaacaagtgagaaaaagaatgcagacccgcaaaccagtaataaaagaagacaaacagcccttgaaggagaaaaagcagaatcagcactgcatgagaccggagaaacagcttcatgactgcgccctcagctggtagccttcgccccgcaccgcttcaatagaaacaggcgcattcagctcccgcagtttttttctgagccgcgtgatatacacgttaagtgtattatcatcgatgaatatgtcggtgtcccacgtcttttccatgagacggtcccgactcgtcaccttttctccccgctcaagcagcacttccaaaagcttgctttcttttttagaaagctcgcttttttcatcctgaaaacgcagttcaaaccgttccacaaagagctgaacgccggcatattcaaccactttctctccctgctttgcggcgtactccccgtacgccctccggatctggcttttgattttcgcaagcacaatatcataagaaaacggtttttcgatataatcgtctcccccattttcaatcgccatcacctgatccatttccccgcttctggcagaaataaagatgatcgggcttgtggagtgctggcggatctgccggcaccaataatatccgtcatatgccggcaaattgatatcaagcagcaccacatcgggcttttcccgcaaaaagacatcaagaacagctgtaaaatccgcggcgaccactgtttgatatccgtatttttcaaggtaattctgcaatagtccgcgaatgtcttcactgtcttccacaatcataattttattcaaactgaaccactcccgtttcttacactgctgccatcatcataatcgttttgggcgtatggacgcaacaccgcacaaaaaaaccgccatctcggcggtttctgatctctttagccgacctgctgcttagctgctttaccggctgatccgaactctctcattttgcttcgcactgtctcttccacggcttcaatgccgggtgtcaaatagccgcgcggttcgtacagatcgctgttttcctgaaacatgcggcgtgtttcgtctgtccacgctaccatacattccgtattgatattgatcttcgcgtggccgagtgtgatggcttttttgatctgatcctgcggaatcccggatgccccatgaagaacgaggggaatatcagtcatgcgagagatagcctccatttccttaaatccgagattcggctcaccctgatatttgccgtgtacagagccgagggcggcggccagcgcgtcgatattggtttctttgacgatccgctcacattccgcgatatcggcatagcggaccccgccgaccaggccgtcttccattccaccgaccgtgccgacttcggcttctactgacacgccgtgttttgcggcataatcggtgacttcttttgtcatcgcgatattctcgtcaatcggctgatgggagccgtcaatcatcactgagctgaatccggcatcaatggcctgtctacagcgttccgcactgctgccgtgatcgagatgaagcacgaccggaacggtaatcgccatgtcctccattaacgcgccgaccatggcggcaatcgttttaaatccgcctaaatagtcgaccaggcgatcggaagccgcggcgatgaccggtgattgctccttttgcgccgcctgcaaaatcgccttcgtccactgcaggccgttgatattaaactggccgatcgcatactgctcccgctttgcatcttcaagaagctctttcatcgatacaaaagccatgtccacccctcctttatccattacatgttgaagtattttgatacgacgtccactgttgtttttttcgctgtttgaatggcttcctcagcagtcagcttatagtattcaggccggaatagctcaaccgatacaacatcagagaagccgatttccttcagtgctgataagtgggcatctaagtcaattgccccttgtcccggccatacacgatcctcatctgttaaaaagccgattgggaaatcttctgtatcatcgatatgatagatgaagattttctttccgtccgcctgctttaagctctcaatatttgaacccattgcatggaagtgaaaactatcaaggacaagcccgacattgtcacggttaactgtgtttacgatctcatacgcctgttcaaacgtattgaccgtacattgcggatggccgacaaattcaagcgcgatttttacgccgtacggctccgcgatatctgacagctcagtcagcacctctacactgctctttttgatctcttcttttacaatcttctgctctgtcacaagcggaacggccaccacatatttcacaccgagggttttgcatgtttccatcatgcctttaaattcagtgatgatctcgttgtggcccttttcatcacggttgttgaagaaaacaagcgcgtttagggcaagcggtttgatgtgatgggtttgaaaatattccgcaagatctgccaatgaatgatcttttaagtactcgggcagcttatccattgtgcggatttcaatataatcatagccgtgcttttcgcatagttctaaatcctgtttaaggtttgagttttccaatgttgtcgcttcattaaaacaaagtttcatgccagactcccccatctgcgttttagatatgaagggagttcggcaggaaggctgtcgccatatcccgccgaactccatgctcagcttatgccagacctaattcttctttcattttcttaagcataaatcggcttgattcatccgctctttcatcgacccaagcaaatacggcattcgtcgcaattccgtcgaacttcatctctctcagttttctgaaaatcgtatcaaaatcaacctcgccttggccaatgtccaaatgctggtgaaccgttactttcgcgtcaggcggattgacgatgtagcgaaggccatgagccgctttatgattataggtatctgcaaataaaacatgtgtgaggcggtcgccggcttcgtcaaacatggtctcgatgtcgcctttgccgtcatcatagaagaacgtatgcgcagtcgagtagacaagattgatccaatccttgtcaagcgcgcggatcatatccatcgcacctttgtgcgtttcgataaaatcgtatgggtgggcttgaagattaagtttaataccttctttttcaaagactggcagaagctcatccatggatttgataaatttttcttcacttgttaaaggatcatattttgaaccgctgaattcgctgttcatcaaatccacttcaagttcaaccgcaatttcgattgcccgtttccaattgcgcaccgctgcctgccggcggtcttcatcaggacccgcccagtggtaaagaggaagaagcgatgaaagcttaacacctgtatctcttaaaaggcgctttaattgtttgatctttgctgaatcaactttcggatatttataaaacggacaaaaatcctcacgcggagacaattcgatatattcatagccaagctccgccgttttatagaccgtttcctctaaagttaaatcatcacgatacatggatggatccaatgctaacttcatattttcactcctctgttttttagttttgaactgttgtaaaagattgatagaattccggtttttccttcaattcaaccttttctttttgtccagattcctgggcttttacacacgcgtcagtcgtgacagcagcaatatagccgtcccatgccgtcggtccgctgacctcgcctttcttttgaatcgaatcaataaagtcttggatttccacatcatacgcagcgacaaagcgtctctgccaatccatcaaaatatcagtactgaatctgccttcttttctcaagctgatgcttgatggctcgggaagcttgatgatgccgtcttctccgacgatttcgcattgaatgtcatagccgtatttacagttcacatagatttcagcattgatgacgataccgccttttgtttcaattacgacgatttgcggatcttttaaatgcggcagcgcgtttttcgattttttcgggtagatgacttgaacggactcgtagtcatcgttgacgagccagtgcagcacatcaatttcatgaacaagcgtgtcgactacggccatatcggttgtgtagttatctcctacagtcgggttgcggtgcgcgcagtgaatcataagcggttcgccaatcacatggttatcgagtgcttccttcagctgtacgtaaccgctatcataacggcgcatgaagccgacttgaacaaggcgtttgcccactttgatttcttcttcgacgattcgcatgcatccttcagccgttgtcgcgagcggtttttcacagaacacatatttctgggctttaatggctttcagcacgcttgactcatgcgcaggcccccagcttgtcactaaaacagcgtctacattttcgtctgcaagcaagctgtcatcattcggataaaccgtcgcgtttaattggtattgctcaacgaccttttgtgcagcttcttgattaacatccgttacagctacaatttccgcgccggacagcttgttcgtgatgcggttaatatgttcttttccgattgctccagttccaattacgccaatacgtaaactcattgacagccactccttctgttgattacataattttgctttctgtttcttgctttacttggctctgaggagatccgtagagttcctcttgaatttgttcaagcgacttgccagacgtattcggcgcaaagagcagcccgatgatcatactggccgtcacacatccgagaagaattgcagccatcgttccaatgccgaaattggtgataatcattgggacaaacagactccaaatccctattgaaatacggacaaggaaaaacatcagcccttgtgcggaagcacgatattgcgtaggaaagatttcactggcccataactgatagttcgcttgctgccctgctccgttattgatgccgatcacgacaataaacaggagcagaatcggcaggccttcaattggcagcagaaacagtgtccacccgatcaccgccatgaaagcggcgattccaaatacggtttttctatatttgtcggcaaagggcatgaagatcaaggcgacccccaatcctgtgaagataaacagccccatttgcaaaaggttggccatgttggcagatacaccgccgacctgctgataaatgtatggcataaagaagcccatgaccccggcagctaagttccaaaccaagtacacacccatcaaaaacaatatgctttttagatacataggcttgagcaaatcaaaatacgatgtcttattcagtacagccggcttctctgcctgagcatcctccggctgattttttgtctgccaggcgtctgattccggaagcctgattctcaggatgtacgtaatcagcgcaatcacaagcagatgggcaaatacgattttattccccaagagtcccaagtcaccggccagtacggagagaagcagtacaacgacagcgcccgcggcccaagcgacttgtgctacgccgcaatgcctggcccgattcttctttggcgcattttccgcaataatggtccatgacgcggttatatcagctcctactgataaaccgataatgatgtaaccgcttaacaacatggggaaattaaccccgaacaaaaccaaacaaatccctagtgcataaaccagcatactattggtataaacagccttccgtccgactttatcagccagaaacccgccaagcagcgcgccgacagcggcagaaatcgcattcgcgctcagcgcgccgagcagcccgatttgcgtatcggatagcttaaggtaactgacccataatgataaaccggcggagcctgccacaattgaaccggcatcaatatagttggccaatgctgccgcgattgtccgtttattgaaggctgaatctccattggtattgcccatatgttcattccccattaagccagatccaacaactgctgatcaatatagtttctcgcaatcaatgcatactccagcgggtttgcaacatcggggtcctgttcagcttcaatgacaatccatccggaataactgtgcttcaacagcagctgatatacttctctaaagtcaatgcagccgtcaccgggaaccgtaaacatgccttttaaaaatgattgccggaacgattgtccttcgagcctgcattgttccatgacattcaggcgggcatccttaaagtgcacatgcttaatgcggccgatatgcttctcaagcatccccatgtaatcgccgtcagaaatatacgcatggcctgtatcatagaggaggtgtacatgcgcagggtctgttcctgccatcaggcggtccacttcttccgctgtttggacaccagtgccgagatgatgatgatagacaagcttcaagccatgctgagcggcaatttcgccaaggtgattcagcccttcgcaaagccgctcccattcatcatccgtaaagtgcggcttctctgtgaacacatttttctccaagccttgcacgctgtacgtttgttcagagacaactgcgacatccgcgtttacttgctgcaaatactcacaatgcagggtaaatgtctttgccgcttcaccaagtccgtcacgcaaaataaaactgctgaaccattttcctgcaatgcgtaagttccgaagcttcagctctttgttcaggacggcaggttcggggaaaaagcccccgacttccgtgccttgaaaacgtgcgacaacgatatcacttaacaaatgctgaagtgtatttcccgctccaatttcaggcatgtcatcattccgccacccaatgggagcgattccccacaggatttcatttttgcccatcttggtgcctcccctctaatactgcttcgcagattccagctttttctcttttgcttcgtatgccttctgaacgctttcttgttcagatacctctgccaccccgacatgccaccagctgtcatagccgtccgtcattgttttaggcagaaccttcatttcaattaatgttgatacatcctgtttcttcgcatcctctaacgccgcttttaattcttctactgtgtttgcacggtaggttttcgcgccgtatccctcagcgactttcgcgtaatcgacattcaggatttggttgtcatctgtgcggaactcgcaatagtagctgccgctgccgtgatccatttgcaggttgttgatgcatccgaatcctgagttgtcaaagagcagcacattgattttcttgttgtattgaatcgccgtgatcaattcagaatgaagcatcaggaagctgccgtctccgacgattgaatacacttctctgtcagggtgggccagtttaagaccgagtgtcccggacacttcatagcccatgcaagaatacccatactccaggtgatacgtattcggaacattagaatgccacagacgctgcaaatctcctgggagtgagcccgctgaacagatgatgacgctgtcttcaggaatcgtctcgttgattgtcagcaatgccgttgtttgcggaagctccgtattcaacgcgtcagcatattcattcaggacctcttgagaaaaatgatttttgatttccggatcaaatgcttcccgcttaaacgtcactttgctgagacgctcgcgttcagctagccattcgtccttcagctcccgaatcgttgtgccgaactcgctctcatagccttcaagcaagccatgcagtttgccaagcgtcgctttcgcatccgctaccacttggaatgcatcaagtttatacgcctgcattcggctgacgttaatgttcaaaaacttcgctttatcaaaatcaaaagcggtcttagaggatgtcgcaaaatctgtataccttgtgccgatgccgataatcaaatcagcttggcgggccgctttgtttgccgcaagtgtacctgtgatgcccattccgccaaggttgttcgcaaaatctgcctcaacagtagactttcctgcctgcgtttcaactaacggaatgttataggcttcagaaatggcaaccaattcatcgcgcgcaccggaatattttgcgcctccgccgacgagaatcacaggttttttgctggatttaatcagctccgccgcaccttgaagctcgcgctcgctcggctgcatgcgatcaatatagtgaacccgtttgacgaagaaactttcatcaaaatcgtatgcttccccttcaacatcctgagaaatacaaatcgttgccggacctgcttttgccggatcagtcatgacttcaaacgcgcgcagcaaactgctcatcagctgctcagggcgcgtaatgcggtcccagtatctcgatacaggcttcaatgcatcgtttgtcgtaatcgccgcactgtattcttgctccatttgctgcagtacagggtctggctgtcttgtcgcaaatgtgtctgccggaatcaagagaactgggatattgtttgccaatgcagtgccggctgccgccaccaagttagccgctccaggtccgacggatgtagacaccgcatatatttttcttctcagcatttgcttgctgtacgccatggccgcatgcgccattccttgttcatttttcccttgatagactttcaaatggcctgcatcctgctcaagcgcctgcccgatccctaatacgtttccatgaccgaaaatcgtgaagatcccttcgacaaaaggctcttcctttccatctacatggatgtactgctggtttaagaatttaatcagcgcctgtgctgttgttaagcgaattttcttgcccacaaacgatcccacctttactcgatctttttcaattatgactgtgcttcaataagctgtacgatttcatcagcagtcggcatcgcttctgacgaactgtgcttgctcaccacaatggaagctgaagcactgccgtatttcaatgccgtttcgatgtcttttccggtgacaaggccatagataaaggctgacgcataggagtcaccggctccaaaagttttcagcacttttgtcttgtacgcttgagcgcggaatacctcgccggatttgctgtatgcgtaagagccttcgacgccgtgtttgatgacaacgaggtcggctgaatggccaaataaatgattgacggattcttcattgcttccgcctgtgcggttttccatcacatcaaattcatcgcgtgtgccgatgacgatatcagactgctcggcaaccaaagaataataaacggctgtttcatctgatgactgccacgtatacgggcggtaatccagttcgaacaccactttaacctgatgcttcttcgcgtattgaacagcttttaataccgcttcccgtgacgggcttttggcgagcgctgtcccggaaacaagcagcattttcgcatttgcgatatagtcttcgcttacctctgaaggctcaagataaagatccgccacatcatcgcgatacattaaaatgctgcattcttcagggctgaggatttctgtaaatgcaaggcctgctttgtgtccatcttgatcaacaaccatctgtgttgtatcaacgccggtctttctcatataggactctatgaatcttccatgctggtcatccggaattttgccgatgaagcccgcttttaagccaagcttcgcgctgccgatcgcgatattcgcaggtgaaccgccgacatatttcgaaaatgtcatcgtttcttccattgggcggttgtattcgactgcgttcagatcaatacatgcccggccgatggcaacaatatcaaaagccttctcttcattgaatgtatacttcatcgtaaacagccactcctcacttgttagcgttctaaaatccattcatgcgccgggtcgttataaaacttccattttcgcgtcggccctgccatgacatttaaatagtaggatgtgtatccgtccggaacgcctaccgggtggtatcccgcaggaacgatgacaacgttttcatttcccacagtcattgtctcgtcaatagaacggtcatctgtgtatacgcgctgaaacacaaagccctgtcccgggtctaactcatggtagtacgtttcttctaagaaagattcttccggcaagttgtcttgatcatgtttgtgaggcgggtagctggaccagttgccgctgtctgtatagacttcaactactaatagactgttagctgaagggtctgaatccggaagaatgttatgaacagtacgtttgtttgaaaattgcccgcgatgctcaattccgttgtcttccgctttgatcagctttgtcggaagctgcttttccgatggagaatagcaaagcgccactcttgcgtcgctgactgctgtgatctcaaatgcacggtcatttgatatatagacgctgtctgtcggttttcgttcaaatacgctttcacgcgtgccgatattctcaaaagtcgactcatgatctgtcactgtaatttttcccgttaccgccacaatacagatttcttgttttttcaattcttctgtatagcttgaacctgatgcaagatctaacactttaaactctacataagtgagatcagagttggatgtcgttacttcgtgcacgagtttgaccccattagacacttcatgcgactgcggcttacgcaacaaataactcatagagaagccctcctctttctattggcagaatgagtccgaacagcgcacatggacgccgttcggctgttcgtcgtttagttgaaatcaggtgccggatatcttgccgtcaccacttttttacgtgtatagaagtcgacgctgtcttttccgttcgcatgcagcgttccaaagaatgaagatttccagcctgagaatgggaagaacgccattggagccggcacaccaaggttgatgcctagcattcccgcatcaatgttttcacggaagtagcggattgcgtttgagttggatgtgaacaagcaggcgccgttcgcaaactcagacttattggcgatttcaatcgcttctttcaggtttttcacacggatgacagataagaccggagcgaaaatttcatctttccagatcgtcatttctgttgtgacattgtcaaagatcgtcgggccgacaaagtagccgtcgtcagacacattttcacgtccgtcacatacgagtctggcaccttcttcaagacctttttcgatatagctgagcgtgcgcttcttgttgtcttcgcgaatcaccggtcctaagaacacgccgtcatcaaggccgttaccgattttaatgtccgccactttttcctgcagcttcgccataaattcatcggcgattccttcttcaactgtcacaaccgcacaagccatgcagcgttcaccggcagaaccgaaggcagctccaacgatgtttgtaaccgtgtcttcaagattcgcatcgttcaagacaatcgtatggtttttcgcgccagtcagagattgaacgcgttttaagttttcgcttccttttttgtagacgtattcgcctactggcttggagcctacaaatgaaatcgctttaatttcgggatgctcgaggatgccgttcacaacgtcatgcgcaccgtatacgacgttgaacacccctttcggaaggcccgctttttcaaaaagctcaaccaatttctctgttaacagcggagtccgctcagatggctttaaaataaatgtgttgccgagcgcgatcgccatcgggaacatccagcaaggaaccatcatcgggaagttgaatggcgcgattccgccgacaactccgattgggtaacggtagttcgccgcttcaacgtccgttgcgatggaagcaagtgagtcacccatcatcagggaaggtgctccagcggcgaactctacgttttcaatcccgcgtcccacttcacctaaagcttctttcgtgttttttccgttttcaatggtaattagatgagcaagttcttctttatgctgagacagcagctgctggaagttaaatagaattctggcgcggcgaggaaccgccacctttgaccatgttttaaatgcttcagccgctgtttgcgctgcgtaatcaatatcctcttttgtagaaatcggcacttggcatagcacttctttcgtcgccggattgacgacatcttcatattgatctgttttgctttcaacccattcaccgttgatgtagttttttaattttctgatttctgccattcttattgcctccttcattagtaaacacatacacttgtatggatggttccggatagattcatatcaatatccacttttcagcaagccaagaattaaacgctttcaaaaacaccaaaaaaataaatggcggatgcatatttacatacaagcaaccatttcatgcacaacaggttactttttggtcatttcttggttatattctaatcgcataatacccataagtcaatcataaacactacattttttcattatttttattatattaatcttttaatcaagtaagagaagtaagagaaggccgtccaatcttgcaaaagatatacaccgatgttatcattttttaagcaactattgattaacttttggtttttattatatatttatgttacgtaaagattcaagaaggagttttttatatgaaactgatgcggattcaggaaatggaggagtacattttatcgcatggcactgtttccttagatgagctgtgccaggtgttcaatgtctccaaaaacacagtcagacgtgatatcaacaagctaacagaaaagggtgcgattgaaaaagtatacggcggcgtaacatctattgaaaaaaccgcattagttccttttgaaaatcgcaccattcagcaccaggatgaaaaaacaaaaatcgcccattatgcttcccgatttattgaagatcacgatttggtcttcattgattcaggaacgacgacaaagtctattcttgatacgcttgatccagccaaaaatgtcaccatcttaaccaacagtttagacattatcaatgcggcgtcagctttgaagaatatcaacttaatcattatcggaaacaactataagagaaaaacccgctcctttgtcggcatggacgacccggctatgcttgataagtacaatatcaacaaagcctttatgtccgctaccggaacgacgctgactcacggattgaccaattcggatctgctggagtatgaaattaaaaagaggatttcagaaaaagcaaaagaagtgtatctattggctgaccattctaaattcggaaaatcaacgcttctgacgtatgcaccgtttgacaggctgcattgcattgtgacctctcagccattagacgacgagtacacgcagtactgcaatgagcatcaaatcggcattcatctggcctaacgtttacaatagtgttgagagtctatcatccattttattctaggaggcagatcatgaaaaaagcgaagctcggaaaatcagacttgcaggtattccctatcggattaggaacaaatgctgtcggaggacataacctctacccgaacctaaatgaagaaaccggaaaagaattggtgcgcgaggcgatccgtaatggcgtgacaatgttagacaccgcttatatttacgggatcggccgttccgaagaattaattggtgaagtgctgcgtgaattcaaccgtgaagatgttgtcatcgctacaaaagccgctcacagaaaacaaggcaatgactttgtctttgataattcaccagaatttcttaaaaaatcagttgatgaaagcctgaagcgcttgaataccgattatatcgatttgttctacattcacttccctgacgaacatacgcctaaggatgaagccgttaacgcgctgaatgagatgaagaaagccggaaaaatccgctccatcggtgtatccaacttctctttagagcaattgaaagaagcaaacaaagacggtttggtagatgtattgcaaggcgaatacaacctgttaaaccgtgaagcggaaaaaacattcttcccgtatacgaaggagcataatatttcatttatcccttacttcccgctcgtatcaggtttattggcaggaaagtatacagaagatacaacgttcccagaaggcgacctgcgaaacgaacaggaacacttcaagggcgagcgtttcaaagaaaatatcagaaaggtcaacaagcttgcgccgattgccgaaaaacacaacgtggatatccctcacatcgtattggcctggtatttagcaagaccggaaattgatattttaatcccgggagcaaaacgtgccgatcagctgattgataacatcaaaacagccgacgtgacgctttctcaagaggatatttcatttattgataagctgttcgcataagaagaaaacagccttctccattggagaaggctgtttttttgtgcgataaattcctaaataactgattttgaagcaaaaccttacaaaatgagccataaatccgataaaataaaggtagtttatctcagaaagaaagtgattgagaaagcaaaagtatgaaacgttcatatcatctagctcatatgaaataaagctgacccagcttcttttatttgctggtcagaatagcggaccatttcgatggtctatggaggaaacagaatgaaacttaaatatgtaaaagccttagttgcagtaaccgttgctttaggtgtactgctgccatcaacgatttctcatgcaaagagctttagcggccgctcatcatctagttacagcagccgaagttcaagctcgtcatacagcggaagctataaatcaagcccgaaatcaagctacagctcaggatcaagctcttctagcaaaaaatccaagacgcctgacgattcatcatcatcgatttcgcttaaaaagaagccttcggaaaaggcaagctcatcaagctctaaaaaatcgtcaggcaccttttccggcgctacatcaaaagtaaccggaaagacatacagcggaaaaacgtctaaagcctatgttggcggacgatatgtttcagtcaatcattactatcacgcaggtttcgcgccatcaggatggtttggatattatagcggatttacaatgggtatgttcatgatcagcatgatgcacccatggggttacacctatcatccagtcggaggcccaggttatgtttcttatggcgcttcacccattgcctggatcgttgatatcatcgctttgattattattttaatcattgtcatcgcactgattcgcgcatttaaagcaccgaagacgtacagaaggagattttaggcaatgagattaatattaaatgagcaagaaattgtagacggaatttgcgtgtatatttccaatgaagaagatatctaccctgaagacgttgaagtaaaggagctatcttataacaagcgtacagggttcttcgctgaagctacatttggcctgcaccacaagcagcttatgtcagatgacatttcagaaggcattattcagttcttagaggaataccacaacttcaatccggacgttaccgtcgttgaattgcaatttgataagaaaaaaggcttctccgccttggttttcgtcaacgaagcagaagaataaaaatgtcttaatcaaaaccttactccgcgcgggtaaggtttttttaatggtttctctgagcataaagttatttcgtttttcctaaactcagcggatctgtgatcatctcttttggctttaacgtttccgtttgttcaaaacaaatgtttcaaatgagataggaaatgggtactaatctattaactttgttatacattttagatactcattggctcaacaactgaggaggagacatttgtgaagaaagacacaaggaaatatatgatctactttttcggcgctttagggggactgctatatggttacgatacaggtgttatctccggagcactcctgtttatcaataacgatattcctttaacgacattgacagaaggattggttgtcagcatgctgctccttggcgcgattttcggttcggccttgagcggcacatgctcagaccgctggggcaggagaaaggttgtatttgtcctttccatcatttttattatcggtgcgctcgcttgcgcattttctcaaacaatcggcatgctgattgcatctagggtgatactcgggttggccgtcggcggttcaacggcacttgtgcccgtgtatctttccgaaatggcaccgacgaaaattcgcgggacactcggcacaatgaacaacttaatgattgtcaccgggattttgctcgcctatatcgttaactacctgttcacaccgtttgaagcgtggcgctggatggtcggtctggctgcagtgcctgccgtgcttctattaatcggcatcgcgttcatgccggaatcgccaagatggctcgtgaagcgcggccgtgaagaagaagcgagacgcatcatgaacatcactcatgatcccaaagacatcgaaatggaattggcagagatgaagcaaggggaagcggagaaaaaagaaacgacactcggcgtgctgaaagccaagtggattcgccctatgcttctgattggcgtcggtcttgccattttccagcaggcggtcggcattaacacggtcatctactacgcgccaaccatttttacgaaggccggtcttggcacatcagcttcggcgctcggcacaatgggaatcggcatcctcaacgtcatcatgtgtatcactgccatgatcttaattgaccgtgtcggccgcaaaaaacttctgatctggggaagtgtcggcatcacactgagccttgctgctttatcaggcgtgctcctaacgctcggactttccgcatcaacagcgtggatgacagtagtctttctaggtgtctatatcgtcttttaccaggcgacatggggtccggtagtgtgggtgctcatgcctgagctcttcccgtccaaagcacgcggagccgcgacagggttcacgactttggtgttatcggcggctaacctgatcgtgtcgcttgtctttccgctgatgctaagcgcgatgggcatcgcatgggtctttatggttttctcagtcatttgtcttctctcatttttcttcgcgttctacatggtgccggaaaccaaagggaaaagcttggaagaaattgaagcaagcctgaaaaaacggtttaaaaagaagaaaagcacccaaaaccaagtgctgaatgagcgtacattataaaaaaaggaatcgtctccttatgggacgattcctttttctgtttacaccatgaccttgcaaatattgttcgtaaattccacagggtcctgaatcggcaggccttcgatgagaagcgcctgattgtacagaaggtttgtgtacaggctcagcttctctttatcttgttcaaacgcgtcctgcagcgtttggaatacctcgtgatttgggttgatttccagcactttttccgccttcacattttggctgtcaggcatcgcgtttaagattttttccatctcaattgtcacttcgccgtcagcagcaaggcagactggatgtgatttaagccgttttgagattctgacgtttttcactttgtctgacagaatgtttttcatttcctcaaacagatccttatacttgctttcctcttcctcggactgcttttgatcctcatccgtgtctatgccaaggtctccgcttgatacggacttgaattctttttcctgataagaagccagcattttaattgcaaactcatcgatgtcctcagtaaagtagaggatttcatagcctttgtccgccaccatttccgtttgcggcagtttctcaatgcggtcgtaagaatcaccggtcgcgtaataaatgaatttctgctcctctggcattctggaaacatactcgtctaagctgaccagttttttctcttttgaagagtagaataataggagatccttcaattgatccttattcgcgccaaaatcattgtacacgccgaatttcagctgtctgccgaacgacttgtagaacgtctcgtatttctcgcggtcttttttcaacaggctttgcagctcgcttttgattttcttgctgatgtttttcgcgatcagcttcagctggcggtcatgctgcagcatttctctggaaatattcagcgatagatcctcagaatcgaccatgcccttcacaaagctgaagtggtccggtagcaggtctgcgcacttattcatgatcagcacgccattggaatacagctccaagcctttctcatattccttggaatagtagtcaaacggcatgttttcagggacgaatagaatcgcgttgtagcgaacggctccatccacactgatatgaacgtgtgtcagcggtttatcaaacccgtaatgcttttcagcatagaatttttcgtaatcctcatctgtcagctcgcttttgttttttctccagatcggcaccatgctgttgaccgtctgctcttcctgcacctcttcaaattcattttcgctgccttccttcggcttattaatggttgtatccattttgatcgggtagcgaatgaagtcggagtacttcttgatgatcgcttttaaacgatattcctctaaaaactcgtcatagctgtcatcttctgtgttctctttgattttcaggataatgtctgtaccgacagaatccttttcacacggctcaatcgtatagccgtctgcacccgcagactcccatttataagcctcttcgctgccaagcgctttactgatgactgtcacgacatcggcaaccataaatgccgcgtaaaaaccgacaccgaactgcccgataatgtcatgtccgtctttcagctcgttttcctttttaaacgcgagggaaccgctttttgcaattgttccaagatgctgttcaagctcatcctttgtcattccgatccccgtatcagagatggttaatgttctcgcatctttgtcagctgcgacctttatgtagtaactgtctttatcaaacgtaagcgcatcgtccgtaagcgctttgtaatagattttgtcaatcgcatcactcgaattggagattaactcgcgcaggaaaatttctttttgggtataaatggagttaatcatcatatccagcaagcgtttagactctgctttaaactcttttttcgccactcttgatcgctcctttaccattatgtaaacccttttcagcatctatttatcacataagatgacaattgtcaatcaggttgatagatgcatatatatgtaaatttaacattagttggatttgttttcactctttttctcactcattctcataaaaaagagaggcttcatcatcctctctttttttctgtgtcattccagcggccaaactcccgcttcatccatatatgcaccgggtagaaaaacaaaccgaacggtatcaaaaacaatagattatgccatgaagcattcagaaatgcgcttgcagtcactggaaacgtaatctcttgcaataaaaaagagatgacagtcagcacaacaaatgcagatggaatggtcacgatgcaataaaacttgagctccttcttatgctgtaccttcaaacttagaaacctcccaacaatttctaattcatcttaacatatgctggcctttcttttctcgcatgtttatcactgcacatagcgggaagacaaatagaaaaaggaggtctcgtatcatgggaagacttgaaaacaaaacagcagtgatcacaggcgccgcgacaggcattgggcaagcgacggcagaggtttttgccaatgaaggcgcgcgtgtgatcatcggagatatcaataaagatcaaatggaagaaacagttgacgcaatcagaaaaaacggaggacaggccgaatcctttcacctcgatgtgtcagatgaaaacagtgtgaaagcatttgctgatcaaatcaaggatgcatgcggaacgattgatattctgtttaataatgccggcgttgatcaggaaggcggaaaggtggacgaatatccggttgacctgtttgaccgcattatcgccgtcgacctgcgcggcacattcctttgcagcaaatatttgattccgctcatgctcgaaaatggaggctccatcatcaacacctcctccatgtcaggccgtgccgcggaccttgaccgctccggctacaacgcagcaaaaggcggcatcaccaacctgacaaaagcgatggcgatcgactacgcacggaacggcatccgcgtcaattccatttcaccgggtacgatcgaaaccccgctgattgacaaattagcaggcaccaaagaacaggaaatgggcgagaaattccgcgaagccaacaaatgggtcacgccgctcggccgcctcggccagccgaaggaaatggcgacagtggccctgttcctcgcgtcagacgacagctcatacgtcacaggagaggacatcaccgcagacggcggcatcatggcatacacatggccagggaaaatgctgattgatgagaaatggaagaaagaaacgaaataagagaggggatgtccctctctttttgtctttcaaagcaatacaaccttatactttttcacatccaaaaactgcaaaaattccctcgccagcacttcaggcggatgcgcctttccttcatccagccgatacaaaagcaacccgataatcattgcggatacataatgggcataaagctttttctctgcgtgaatatcagtttgctgatgcagataaaacgattccagcgctttgaacatatcaggtatcacatgaggaacaccccattcccgattgagaaaatggacaatgggcatatttgacaaagcagaaagcagactggcgagcgccttctccgcttcctttaaggaaaattcattcgggctggaggcaatcgtcaggtgatcaatgatctccgcacatgatcgctgtatcatggttcggagcaattcctccttattggcatagtgatcataaaaggttgcacggcggatattgcttttccgggtaatatccgaaattgtgatggctgcgtagtcttttttctccgccagcacgtccagaaatgccttctggagcgcctctctcgttcgaaccacacgcctgtcgatttgcttgtccttctctcgctctcctggcacagcttgtccaaacagccaataaaatctcttttgagaaacaagctcccataccttttggctgatagcttccggagtcgcggccgcatcctcattcagccaatacaggataatcgcgtacgtgtacaaggcccggtaatgtccgtaaatttcccgttcgatcggcgtcaaattcacatggaccggagtcagcagcacatcctgctgaaacacatccttaaaaaaacgatggaaatgccctctgttcatcatcacagaaaaaaaggatcgatgctcatgaacaaaggacagcgtcggatgcaccgtttgccgttttttgttcaaatggagggtatccatatgactgaaggcgccaaaaagcgctttgcccagcccttccttcttgtcttcgattaaatcctcaatgattgaaaacttatcctcataataaaggtagagcgatccgcggctcactttggccttttcagcgatttctttcattgtgatgtgttgaatatctctttcttccaataaagccagcagcgcctctttcacttgagcttcggcagattccggcacaaaagacacccccaatcattagacagatcttcgatatatgtacggtaacgtatagatggttcaccgttgtctttcttacagaaaaggtaccaccttataataggtccgagaaaagaagaaagcaaatgagggggattttacaatggaacagcaagtaaaggacgacatccagcgtgtctttcagcttcagaaaaaacagcaaaaagccttgcgcgcttcaacagcggaacagcggagagaaaagcttcaacgctttttagattccgtcatcgcccatgaagaagaaatcatcgaagcgatccgcaaagacgtccgcaaaccatatcacgaagtcaaaaaagcggaaatcgaaggaacaaaaaaagcgattagagataatatgaataacctggaacaatggatggcgcctaaagaagtcggttcatcgttaagccctgacgcaaacggaattcttatgtacgagcctaaaggcgtcacactcatcctcggcccgtggaactatccgtttatgctgacgatggcgccgcttgccgcttctctcgcagccggaaacagcgcgattgtgaagctgtccgatttcacgatgaacacgagcaacattgccgctaaagtgataagagacgcttttgatgaaaaagaagtcgcgatttttgaaggagaggttgaggtggcaaccgaactacttgatcagccgttcgaccatattttcttcactggaagcacaaatgtcgggaaaatcgtcatgacagcggctgccaaacacttggcatctgtcacacttgagcttggcggcaagagcccgacgattattgacagtgaatacgatctgatggacgcagcgaaaaagatcgccgtcgggaaattcgcaaacgccggccaaacctgcatcgcacctgattacctgttcattaaaaaagacgttcaggacaggttcgcggggattttacaaacagtcgtcaacgctggatttatggaggatgatcataccccagaccgcagcaaatttacgcagatcgtcaatgaccgcaacttcaaccgcgtcaaagatctgttcgacgatgccatcgaaaaaggggcggaagtggtgttcggcggcgtatttgatgccagcgaccgcacgatctcgccaaccgttttgaaaaacgtcacgcctgatatgaaaatcatgcaggaggaaatcttcgcaccgattctgccaatgatgaactatgaagacatcgacgaggtcatcgattacgtaaatgaccgcgataaaccgcttgcactttatgtgttcagcaaaaaccaagacctgattgacaacgtccttcagcacacgacatcaggaaatgcggccatcaatgatgtcgtcgtccatttcagtgacgtcaacctgccattcggcggcgtcaacacaagcggaatcggctcctatcatggggtatacggattcaaagagttttctcatgagaagggtgtatttattcaagcctctaaataatcataatgaagagaatctgcatcatcttgcaggttctttttttatctttatatcacctaaataaagagattaaaagtgataaaatacaattttcaaacgagacaaaattcctctagtctatctcattgaaaccctgcagcccctaacgtataatacccagaaaactttaaaggagtaaaatgatacatggaaaaaccagcaggattttggattcgggcagccgcctctattattgatgtatttattatagctatattctctttcattatgattttattaacaccttcattgtgttgccactcattgatgcagcaggtacacacatgtcagaagcccgatatgagtttttcatgttgatcattggcacaatccctgttttggccatcatatttattttcgctattctttactatagcttgctgacttcctcaaacatgcaagcaacattgggaaaaaaactcatgggcatcatcgttgtcaatcagtatagcgagcgtatttctttttggcacagcttcggccgtttcttcgcttacacattatttaagatcttatatatcggttttatcatggcggcctttccctctaaactggcattacataattatatttgcgggacaaaggttgtctataaaaataaatatcttgattgatcaaaaaaacaggctgccgagttaacctcgccagcctgttttactatttcccaaaagccatcagcttcgtataacttccaatataaagcgttccgtcctcagcgagctgaggagatgacactacgttgctgtcggtttgatatttccataattcattgccgtttgcgtctgccgcataaaccttcatatcatctgacccgaaataaaccgttcccttcgcgtcaatcagcggcgccgttctgacagggccgtctgtgtagaatgaccagttcatatccccgtttttgctgatggaaaacagctcgccgcttcctgagccgatgtagatattgccattatgatcaatcgcaggagatgagctggagaacccgtttagcgggaatgtccatttcaaactgcctgttgatgtataagcatacagctgtccatcttggttgccggcataaatgtttccgtccttatcaatcaccggatatcctttaaacgcatttgacgtcgttctggaccatttcacctgtccggttccggagttgatcgcataaaacacgtaattatatgtgccgacatacacggtgccgtttttggcaagcaccggcacagagctgacgacaccatttgttttcaacttccagcgctctgtccaggttgattttgacgtcggtttgatcgcgtgaacataattatcaagtgttgagaaatacaacgtcccgtctgaaccgatcaccgtttcagagcttggcccgccgcttaacggaaccgttgttaaaatttctcccgtttctttgtcaataaaataaatctttttgtcataggatgccaaatagataacgccgttggtcccaagtacaggagattgcgtatatgtttttccaagattgcccgtcacccatttgactgagccgtctggattaaaggctttcatttccccgtctctggaatgaagatatactgtgccgtctccgtcaatcacagcccccgctccattttgcggagtcgttctgatgtcgttttgccatttcagcgtcccatctgtatttccggcgaaccggctttcgcgtgaccagttaaacatggcaggcgccatcgcttgtacatcatatcttcctggcaaaaagccagatgctccattattttgagaaaacaccgtttccgccgcataagcagctgtcggctgaagcactttggcagcgggcacatcagaaacagcgccggccgaaacagccgccgccaccgcagctcccgcaatcaaagctttcatacgaaatgacttgaccatcattgagacccccattatatgtaacttctaatttgtgaccatcataacatattcatccattttataaatctatttcacaaaaacatcacaaactagaaaactatgtaagagtattcacggacgttttttcagcacccggccgaaatgcagccacaaaccaaatgacgttgacagcagccgcagcgagactaattccgaaaacaaagatcacctcagaaagcagatggtcactaaagaaactaaacatcaagataaaaccggccgaagacaaatgaatcaaaagcccgaagccgcaaagcaccgccatgacatacctcattgcatcgactccgagcatataaacgagaaatggaatgaaatacaatacaaggatcataccgacagctgaccacatgccagctgaattaaactgattggccgccgctcccgttccggccagcggcgtaagtgaagccgccactatcacggcgcaaaaaagaaacgcagaaatggttgtcatgatcgccacgctattttttttagacatcaaactcctcctttaatagaaatattaacctttttcattataagtaagttgaatgttatattcattatattttttaaaaaaatccagatcgtacaaaaatgatatgattctttctagtatatttatatagtaaaaaacaaaggataaaagactcatttttctgtaatatcaggattttatcaccataccatattgcatgtacttgtttttcaaagtatactattccagattaattcagaggagagagaaaaatacatggaaaaaccagcaggattttggattcgttttttagcttattttattgatggcattattgtatctgttcctagttatattattctatttgtgatcaattctgtttttgtagctggggctgtggcaacaaacccttacatgacggaagaagagtatttagtgaaatacatgacgcttgcatttttgcctactatgctgatcatgatcgtcatcagtgtgttatattacgggctgctcacagcttctaaaatgcaaggcacacttggcaaaaaaattcttggcctgaaagtggtcaatgaacaaggtgaacgggtttctgtcggacagggaattggccgttactttgcctatatcttatctggaatcatcttttatatcgggtttatcatgatcgcctttggagagaaaaaaggcctgcatgacatcatttgcaaaacacgtgtcgtgtataaataatagaaaaaagtctagacgccaataggcatctagacttttgttttctttacaataggctgccacgacagatacgtagcgcttctccacagccactcaaacggccccatccgaaagacacgaagccaaaggtggctgaagaccatttgaacggcacaaaccgtaattgtaatgagcacaccggcagcagggtacacttttccatacaggcccaagccgtaatgataaaaaatccaagtacacacaatagactgcatcaaataattggtaaatgccatcctcccaacagcggagaatgattgcagcactgttctcactcttgttttatgataaagatagacaaccgttgtaacatagaaaaacatgaggaaaggcgcgccaatcagcagaaatagttccttttccgttacactgtacagcacatgggcgccgatgccgatgacaagcccagccatccataatcgttttaatcctttgcgatgcttttccggttcatgcaaataccgtgattttgctgccgcagctcccagcaaaaacatgctgaaataaggaatggatgcaaagaagaagttgagcggattatacgtaagcatgccattcgaagacatataaacaagacggtcatggatccgctgttctgcaatgtccttcaggctgccgcttccataaacatgaatcgcttgtgttgcctgctgtgttaccgcttgtacccattcctgtccgtttgattgatcaaaacttgtcaacatgaacggaatggaaaacagaagatacaaagagaccgcccatatcagcagtgttttcggctttgcttttcgaaacaagagcaggacaaaaccgagcaaggcatattctgttaaaatatccccgtcccatatcaaaaaggcatgaatcgttccaaacaagagaagcgccattaaccttctcacatataacggaacaaaccgtttccctttgttttctgctctctccatcatgacaaccatgccaaatccaaataaaaaggaaaacaataaaatacattttgtttgaatgaagaatttcagtatgtctgcggcggcaaaatcagcttcagaccacttatccatgaaaaaattctcttttccaagcatagacaaatacatatccggataactgaaatgtgccagattgacaaataagatgccgaaaatcgccattcctctcagcacatcaagcacaccgatccgctcatttgttaaagtcggctgtaatgaagacatagccatcacgctccttttttctgtaccttaagggtatgaaaaaatgaagcgcggaaacatcgatttaggtgtcaggccggcatgaaaaccttacaatcttgtcatctttatggtttcatcacctttaaatctaatgcttcgatattctgcaaaacgcgatcaaaacgcaaagcctgaggctcacatgggaagatgtggccttcatacgggtcgcctaacgtccggaaaaacggttcaaataaaccaggaaccaatacgcccaccatctttgtatagtaagaatcaaggcgataggagtgaacggtatttgcagggacatgcaggaaatctcccggattcagctgaatttcctggccatctgcccacatcgtcatctggccttcaaggcaataaaatgtttctgtatgatgttcatggtagtgatcaacgattcggtcacctttagggccttcagaggatacgacgataaactggccatctgtatttttttgtgcagccacaatgcggtgaagctgatctccagtcaacaggcgatctccttctccagattcaagaacgtatggaaccgctccatctggcagctctgtaagttccgctaatttggccgaacatgcaggcttttcttcatctagaaatacaatgtccgctacagcggctgcttctgcaaatcgctcgtttgagacttcttcgcttgcgtacggcggatgttcagcgtgatcatacggattcccaataacggaatacaagtgcgctacgtttcctttcatcgtgtaagataccagtcttgttctgtggctctgcatccggtagctgtgcggtgttcccgccggaatgttggcataatcacctgatattaataaatagcgttcaccatcaagtgtcagttccagtttcccgtccaaaacgagaattccttcatgtgtgtccttgtggacgtgaagcggaaaggcatctccttttcccccggaaagaagcacgatctcaaacaaatcacctgtgctcctcccattcgcaatcaccgtggcaacctgtctgccgaacagatagcgctcgccttctccgctccggagcaaataaggcattttttctttgggcaatgaatgtgtacataatgttttcatattatcgcttcctccaatttagaccagtctatatactataactttctgactagaccgttctatataattgtaggagaaaggataacaaaatgctaccctttttttctcaccagcactggtatttgttcggcaatgagaagaagaggcgttttgtctttattcgttaacgaaagcatgatgccgccctcaatcatcgaattaatcagcgttccaagctgatttgcttcttcttctgcaaatccgttttccattaattttctggcaaaaaccgcttcccagcttttaaacaccttcatgcaaaccgtccgtagcggttcactgattaacgctgtctcactcgccagcaaaccgactggaatacctttaatgctttctgtgttgtcaaattggctggctgtttttttgataaaaagctgaatcgcttcaataggatcagaggattcatccatgctttgctgtatcagatgttcaacgatcttacctgtatatgtaaccgcttcaattgctaattcttctttgccattcggaaaaaagtgataaagcgatcccttaggagcaccgctttcttttacaatctggttcaaacctgtcgcgtgatatccttgcagctggaacagacgtgacgccgtgtgaaggattttttcacgtgaatctcctctgctagtcattaaaacattccctcctaggtatggtagagcgacttatataatataaaaaagaaccctgtgattgtcaaaaggggtaagacccttccggatggggtaatgtacaaaaacagcgtctaggagggatctctcaatgacaatcgatcattcagtcacgaatacagagcagcttgaacaacagaaccccggcatgaaaacgaagatcaaactgaaaaaactcaaggatcaggtgatcgtcattaccggcgcttcaagcggtatcggacttgtcacggcgagaatggcagctgaaaaaggcgcaaaggtcgtggcagcagcgcgaaatgaagacgcgctgaaggagctcactgatgaacttaaggaaaaagggcacgacgccatatgggtaaaggcggatgtcggaaaagaagcggacgtcaaccgcatcgcagaaaccgcgatcagcacattcggccgctttgacacatgggtcaacaatgcggccgtctcgactttcggacatgccatggacgtcaccgttgaagacatgaagcgcatgttcgacacaaatttctggggacctgtttacggaacaagagcggctgtcaaacactacactggcagaggtgtgccgggcgcactcattaatgtaggaagcctgttcggagacaggggaacagtcattcaatccacatatgcgtctgccaaatttgcgcttcacggctggacggaaagcatccgaatggagcttgaaaaggaacaggcgcccgtctcggtaacgctcatccacccgggcagaattgacacgccttataacgagcatgcgcacagctacctcgacaaacagccggctcattaccgctccatgatctatccgccggaagcagtcgccgaagctatcctgtttgccgccgaaaaccctaagcgcgacatgtacatcggctcacaggccaaagccatcgccatgctgggcgcgcttttccctcgtctgaccgacagactgatggaaaaaatcatgtatcacagccagcatgccgaaagaccgtccaaaccgcgagaagaaagcgctctttatgatgcgggctgcggtatgcatgacagaggcacaaataaaggatggatgaggtcaagaagctactacacaaaagcgacgaagcgccccattgtatcggcggctgttgttgccggactagtggcttgggctgccgccaaacgatgcagataatctctgaccatgatagaaaaacccatgctgttccagcgaaccatgggtttttcagctgttaatcgataaaagccttgttcatacgctgcagcagctcgccaaacatctctttttcctgtgttgaccattctttcagcatctgttcataacgttcaaggcgcttttgctgatcggcttttaatagttgtttgccgagttttgtaatggtaaacaggctgactctcccatcagatgggtctgagaaacgatagatgagctcctttgcctctaatgcagctgcttgtcttgaaagagtagaaatatcaagcttaaacgattctgccaattccttaacacgagcaggcccaaactcatccaattgtctcagtaataagtacgaagatctctccaaattccctgttcttttctccgattgatccagataaacagctctcctgataaaagtcgtcagctcatattcaattaattcaactggattttgattttgcaatcgctctcgctccctattccaatctccggcattgacaacatcatatatacttgtataatacaaatgtacattaactgaataaatacaagtcgttatatgactaaatcaattattatacttgtatagtacaatcatataaaaagaaagtaaagcgattcctcagaaccatcctagaagcaagcaccagaaaggaggaagctgttctgattggagagcagcacttgatgtgaaagtcatacgaattattttgcaagtgttgatattatatgtattttttatgatcggggaagccattcagcatctgtttcatttacccgtgtcaggaagcatcgttggattggtattgcttctgatctgcttgggcctccgtattgttcccgtctccatcattgaagacggagcagggtttttattatccttccttccattgttgttcatcccggcaatgacaggagtgataaactatccgtctctcatttcattcaatggcctgatgctgctgattacagtcgttctgagcaccatcgtcacgatcattgcggctggattcgccagccagctattagagaaaaaagcaaaaaaacgggaggagaaagagaaatgcagcaagcatgtatcgcgatcattataattcttttaacagttgccgcttatttagcgatggtcaaactctataagcgattcccgcttccatttcttatccctgttctgacaacgaccattttgattgtagcggctttgatgatgtttcatgtttcctatgaaggctatatgatcggggggaaatggatcaattctttgcttgggccggctgtcgtggcactggcctatccgctttataaacaatggcatatcattgtcaaacattgtgttcccattttaggcggcgtcctggtcggattatgcatgggaatgatcagcgggctgatcttcgcagaagcattcgggattgatcatgatctcttattatccattctgccaaagtcgatcacaacccctgtcgctattcagatcgccgccggtcttggcggcgtcccttccatgacagtcgtatttgtcatgattgcgggcttttcaggcgtcatcctcgggccgcttttcctaaaatggcttcgcatacgcagttccctaggacaaggcattgcattaggcagcgcctcccatgcactaggcacctccaaagcattggaatatggagaactggccgtctccatgagttccgtctccatgacgctttgtgcggtgctcggctcattcttcggcccgctcgtcgtctggctgtttcatatttaacaaagaaagactgccccgggggagggcagtctttttcgtttaagaagcaaaaaaatcaatcagcggctgaaagtccttagataaatcaacgtcattcggttctgcttgaagcaggcggtcaatcatacgctccagctcctcaacatcattcttatccgtatattcaatgaagtttaagctttcaagccaatcccgatatgaatgtttggctttgccatagctgtttccaaagacaaggcaaggtgttttggtgataatcgagaaaatcatcgcgtgaaggcggtcggtaatcaccaatttactggagccgatgcggtccagcatctccataaaatgcttttcacgatcagcgtaatcgatggtgtctaccgtatccagcaccgtatcggtacgctctgtgtaagttgttttttctgcccattgcttcatctgtgaaataaaatcttcgtcagtcactttctccttatccgctcttaaaataaagagaacgccgtcccgctcgagctctcgcggcacaatatccaaggaaagcaccatgtccggtgtaaagatcacattggagttgaaggtctctttcacaacatccagtgtttgcgtctcacgcgcagcaatcgttaagtttgtattttgatggtacgcatcctgtgtttttttcttttccttctgtccttcctctgtatcctcaaaataaacggattgtggcagagaaattgatttgtagtctttaaacgccgaaaagacctttcttctgtcttcctcaatatcgagataaaggtttcctaagttccctccgcctgtaaagcagacaatatcgtcttcacgaatgatctccttcaccagttcaatgccctcatccgtcgcataatccataatctcaatgtattcataatacggaaaatgatttttgataaatttctcttccgcatacgcaatcgcttggtctccaatgtttgtgtaactaggggaaccaaacaaaaatacttttcgtttatcatttaacagagcttccggctccacatttggcgcaatgccttttactagttttttgcctttgattttttgtacagtcatatctgcgtcctccttctgggatgaattcctcattgtgtgttaactgtctctacccaaaaagaaggatggctatgcattggcatgtgcatcggctatatcagaaacatcgttttcgccaatttgatagacgctgcaatgtcccgcgccgttctttccatatattccgcggcatgttcaaacgcatcttctagcggcacggctccggggacgatgctgaaaagcgcatcgattccgtgttgatagacggcatcactgtcacgtgatactgatcccgcaataccgatgacaggcacatcatatgatttagccgccttggctacgccgatcggcgtttttccatgaaccgtttggctgtcgatccgtccctcgccggtaatcacaagatctgcatcctgaacgatactttcaaaatcaaccgcttcaaggacaatatcaatgcctcttttcaggtcagcctgaagataagtcagcaggctccatccaagaccgcccgctgcaccggcgccctctgtatctcggaaggttgatccgagctctttttctgtcatatcagcgaaatggcttacgttctggtctagtacatccagcatgtcggccgtcgcgcctttttgcggcccgaaaacagccgtagcgccctttggtcctgttaacggattgtccacgtcacaggcaacttccagtttgacattccgcaatctggaatcaagcccgccaacatctattgatgcaagctgagataacgcgccgcccccgggccaatctcgcggcctgagttatcaagaagccttccgcccaatgcctgaatcatcccggctcccccgtcgttcgtggcgcttccgccgattccgatgatcaatcgctccgctcccgcatcaagagctgctccgattaattctcccgttccccttgttgtagtgatgagcggatttcgcttatctacaggcaccagatgcagccctgaagcagcagccatttcaatcacagctgttctcccatctcccatcatgccaaagaaagctctcaccggttcccccagcggccctgtgacaacttgctctatgatccttccattggtcgcatcgaccagagattgaacggttccctcgccgccatccgccaccggcaattttctgtaatcagcacccggaaagaccgatttgaaacctctttctatcgcttcggctgcctccagagctgataagctttccttaaaagaatcaggtgcaatgatgattttcatccaaatcgcctctttcaaaacatgattcacttacgctagttatctccaatgtaccatattccatttagaaataaataccataatgattgggaaaaattttattaaaaattagaaatgaaagtgtttgcataaaagaaatattcacgttatcatacttgtatacaagtatacttcttgagtgaggaaggtgagtgtatgctagactccaaagacctgttgtatcccgcaaaatggctctcaaaagcgtcaaccggagttcgtgtcgcatacgagctgagaatgcggatcgtttcaggtctgattgaaagcggtaccattttatcagaaaatacaatcgccgccgagttttcagtaagccgttcgccggttcgcgaagcgctaaaaatactcgcatccgaaaaaatcatccgcttagaacgaatgggagcggtcgtaattggtttaactgagaagaaaatcgcggaaatttatgatgtgcggttactattagaaacatttgtctttgaacggcttgtcaaaatagacattgagcctttagttaaggatctcagcaaaattcttgaaatgatgaaagtctcaatcaaatatgaggacgctgacgaattttcatttcaagatgtgctgttccatgaaacgattatccgagcgattgatcattcatacattcagatgatctggaacaatctaaaacccgtcatggaaagctttattcttttatcgatgcgggtacggttaaaggaaaagtatgaagacttcacaaggatcttagataaccacgagctttatattcaagccatcaaaacaaaggatagggtgctgatgattcagtctcttcaccaaaactttgatgatgtgcaggataaggtagaagacctatggctctcacaacaaatgctggcaaaaggagctgaatacaacaatgactagttatatgttaggaatcgatatcggcacgacaagcacaaaagctgtgctgttcagtgaaaacggagatgtggtacagaaagaaagcatcggctacccgctctatacaccggacatctcaacagcagaacaaaatccggaagagatttttcaggcagtcatccatacaacagcgagaattacaaaacagcatcccgaaaaacaaatctctttcatttcgttcagcagcgccatgcacagcgtcattgcaatcgacgaaaatgacaagccgctgacgccatgcatcacatgggccgacaacagaagtgaaggctgggcgcataagatcaaagaggaattgaacggacatgaggtgtacaaacggacgggaacaccgattcatccgatggcaccgttaagtaaaattgcctggatcacgaatgaaagaaaagaaatcgcttccaaggcaaaaaaatatatcggcatcaaagaatacatttttaaacagctgttcaatgagtatgtcatcgattactcattggcatcagcgacaggcatgatgaacctgaaaagcttggcttgggacgaagaggcactgcgcatcgcaggcatcacgccggatcacttatccaaactcgtgccgacaaccgagatctttcagcactgcagcccggaaatagcgatccaaatgggaatcgatccggaaacgccttttgtcatcggggccagcgacggcgtgctgtccaacctcggcgtcaacgccattaaaaagggagaaatcgccgtcaccatcggtacaagcggtgccatccggacgattattgacaagccgcaaaccgatgaaaaagggagaattttttgctatgccttgacggacaagcattgggttattggggggcctgtgaacaatgggggcatcgtccttcgctggatcagagacgagtttgcctcctccgaaatcgaaacagcgacacggctgggcattgatccatatgacgtgctgacgaaaattgcccaacgcgtcagacccggttctgacggtctgctgttccacccatatctcgccggagaacgcgctccgttgtggaatccggatgtacggggctcatttttcggcctgaccatgtcgcataagaaagagcatatgatacgcgcggcattggaaggcgtcatttacaacctgtacacggtgttcttggcgttaactgaatgcatggatggcccggtaacccgcatccaagcgacagggggatttgcaaggtcggaggtttggcgccaaatgatgtctgatatcttcgaatcagaggttgtcgttccggaaagctacgaaagctcatgtctcggcgcctgcattttaggcctgtatgcaacaggaaaaattgactctttcgacgccgtgtccgacatgatcggcagcacatacagacatacgccgatcgaagactcagccaaggaatacagaacattaatgccgattttcatcaatctatcaagattattagaaaatcaatatacacaaattgcagattatcagaggggcttaatcacacacaaatagtacatgacatgaaggggagggcattaccatgccgttaatcatcgttgcacttgggatcttagcattactatttctgattatgggcttaaaattaaacacatttatttccctgctggtcgtatcgttcggcgtggcactggcactcgggatgccgttcgataaggttgtcagctccatcgaagcagggataggggggactcttggccacatcgcgctcatcttcggactcggtgcgatgctgggcaagctgatcgcggattcaggaggcgcacagcgcattgcgatgacgctcgtcaacaaattcggcgagaaaaatattcaatgggccgttgtcattgcctcatttattattgggattgcgttattttttgaagtaggactggttctattaattccgattgtctttgcgatttcaagagaattgaagatttctattttatatctcggaatcccgatggtcgcggcactatccgtcacacacggtttcctgccgccacacccgggacctacggcgatcgccggtgagtatggcgcaaacattggagaagtgctgctgtatggctttatcgttgctgttccgacagtgctcatcgcagggccgttatttacaaagtttgcgaaaaaaatcgttcctgcatcatttgcgaaaaacggcaatattgcatcactcggcacacaaaaaacgtttaaccttgaagaaacacccggctttggaatcagtgtctttactgcaatgctcccgattatcatcatgtcggtcgcgaccattatcgacctgcttcaagaaacaatcgggtttgcagataacggaattttagcttttatcagattgattggaaacgcatcgactgctatgattatttcgttattggtcgcagtctatacaatgggcatcaagcgcaacattccagtcaaaaccgtgatggattcttgttcaactgccatttcacaaatcggcatgatgctattgatcatcggaggaggcggcgccttcaaacaagtgctgatcaacggcggtgtcggcgattacgtagcagacttattcaaagaaacggcattatcgccaatcattctggcatggctcatcgcggcgatcctgcgcatttctctaggctcagcgactgttgccgcactaagcacaacaggtctggtcattccgttattgggccattctgatgttaacctggcgttagtcgtactcgcaacaggcgccggaagtgtcatcgcttcacacgtcaatgacgccggcttctggatgttcaaggaatacttcggattaagcatgaaagaaacattcgccacatggacattgctggaaaccattatttccgttgctggactgggattcattttattgttaagtttagttgtatgaaattaagaaggagctgtaacacatgttcaattcgattggtgtcataggcttaggcgtaatgggaagcaacatcgccttaaacatggcaaataaaggtgaaaacgtcgctgtctataattacaccagagatttaacggaccagcttatccaaaagctggatggacaatctctcagcccgtattacgagcttgaggactttgttcaatcgttagaaaaaccaagaaaaatctttttgatggtcacagcgggaaaacccgtagattccgtcatccaatcattaaagcctttgcttgaagaaggcgacgtcatcatggacggaggaaactcccactatgaagacacagaaagaagatatgacgagctgaaggaaaaagggattggctacctgggagtcggcatttccggcggtgaagtcggcgcattaacagggccttccatcatgccgggcggagatcgcgacgtctatgagaaagccgctcctatcctgacgaaaatcgcagctcaagtcggagatgacccttgctgtgtctatatcggaccaaaaggggcagggcactttacaaaaatggtgcacaacggcattgaatatgcagacatgcagctgattgcagaagcgtatacgtttctaagagaaacgcttcatctgccgctagatgaaattgcatctatatttgaaacatggaatcaaggtgagctgaaaagctatttaatagagattacagctgagattttacgcaaaaaagacgaaaaaacagggcagcctctgatcgatgtcattcttgataaaaccggacaaaaaggcactgggaaatggacgagcatgcaggcgattgataacggcatcccgtccacgatcatcacagagtccttgttcgcccgctacttgtcatccttaaaagaagaacggatggcagctcaagacgtattagcaggcccggaagccgaagaaaaacacttggataaagacacctggattgaatacgtcagacaggctctttacatggggaaagtatgcgcctatgcacaaggctttgcccaatataagatgtcatctgagctttacggctggaatctgccgctcaaagacattgccttgattttccgaggcggctgcattatccgcgctgatttccttaacgtgatcagcgaagcattcagtgagcagccaaatctggcaaacctgctgatcgcgccttatttcacagataagctccatgcctatcaaacaggcctgcgaaaagtcgtttgcgagggaatcagcactggaatctccttcccatgcttaactaccgcgctctcttattacgacggctaccgcacagggcgttccaatgcgaacctcttgcaggcgcagcgcgattactttggcgctcatacgtacgaacggactgatatggacggcgtcttccatacgaattggtctgaataacctgtcatcaaaaacacggtcagttttcaactgaaccgtgtttttttcttctatcccaaacaacagaagacataagttatgttttaaatatcataaacagtgatacaataatagctagaaacaatccccaagatcatcatgtgacagcagcttgctgttccgttctattctgcttttggccattgtcctttgcccttgcccatggtgtcataaaatgttcaaatgccaaaacggcctgtcattctgatttacaaaagtccctgaaaaccttgtctaattgagaatcagcctctcatttgttataaaagaaatgcataaatcctacctgtcacaccttaaataagttgaaaaaaagtaggttatcgcttgacaaaaaatatatattaattaataattcatatataattagaattattattgaaagcgaatatgctttctaatacatttttaggaggaatatacattatgtctttaatcggtaaagaagtacttccattcgaagcaaaagcattcaaaaacggtgaattcatcgatgtaacaaacgaagatttgaaaggccaatggagcgtattctgcttctacccagcagatttctctttcgtatgcccaactgagcttgaagatcttcaagaacaatatgctgctcttaaagaattaggtgttgaagtatactctgtttctacagatactcacttcgtacacaaaggctggcatgacagctctgaaaaaatcagcaaaatcacttacgcaatgatcggtgacccatctcaaacgatctctcgcaacttcgatgttcttgacgaagaaactggccttgctgaccgcggaacattcatcatcgatccagacggcgttatccaaactgttgaaatcaatgcaggcggtatcggccgtgacgcaagcaaccttgtaaacaaagtaaaagcagctcaatacgttcgtcaaaacccaggtgaagtttgcccggctaaatgggaagaaggcggcgaaactcttacacctagccttgatctagtaggtaaaatctaaggagtgcattcaattggtacttgatgcaaacatcaaagcacaattaaatcaatatatgcagctaattgagaatgacattgttctcaaagttagcgcaggcgaagatgacacttctaaggacatgctggctctcgttgatgagctggcttccatgtcatcgaaaatttcagttgaaaaagctgaattaaacagaacgccaagcttcagtgtcaatcgtgtcggagaagacactggcgtgactttcgccggtatccctctgggccacgaattcacatcattagtgttggcgctgctccaagtgagcggcagaccgcctaaggtggaccaaaaagtcattgatcaggtgaagaagatcagcggtgaataccacttcgaatcttatatcagcctgacatgccacaactgtcctgatgttgtacaagctttaaacatgatgagcgtgctgaacccgaacattacgcacacgatgattgacggtgcagcatacaaagcagaagttgaaagcaaaaacatcatggcagtgccgaccgtttacctgaatggcgaatccttcggaagcggccgtatgacgcttgaagaaatccttgcgaaaatgggcagcggcgcagatgcatctgagtttgctgacaaagagccgtttgacgttcttgttgtcggaggcggacctgctggtgcaagtgcagcgatctacactgcacgtaaaggcatccgcactggggttgtcgctgaacgcttcggcggacaggttctcgacaccatgagcatcgaaaacttcatcagcgtcaaagcgacggaaggaccgaagcttgcggcaagtcttgaagagcatgtgaaggaatatgatattgatgtcatgaaccttcagcgtgcgaaacgccttgagaagaaagatctgttcgaacttgaactcgaaaacggcgctgttctgaaaagtaaaacagtgatcctttcaacaggtgcacgctggcgcaatgtcaacgtacccggtgaacaagagttcaaaaacaaaggtgtcgcatactgcccgcactgtgatgggccattgtttgaaggcaaagacgttgcggtaatcggcggcggaaactctggtatcgaagcagcgattgatctagcaggtattgtgaatcatgttactgtgctagagttcgcgccggaactgaaagcagacgaagtcctgcaaaaacgtctctacagcctgcctaacgttactgtcgtgaaaaacgcacaaacaaaagaaatcacaggtgatcagagcgttaacggcatcacatatgtagaccgcgaaacaggcgaagaaaaacacgttgaacttcaaggtgtattcgtccaaatcggtctcgtgccaaacacagaatggttagaaggaacggttgaacgcaaccgcatgggcgaaatcattgtcgacaaacacggcgcaacaagcgtaccaggcttatttgctgccggcgactgcacagacagtgcgtacaaccaaattattatttctatgggatcaggtgcaactgccgccctcggcgcgtttgattacctaatccgtaactgataaaaaaatccgctatattgccagattggcaggatagcggatttttctttttctacagaaaaaacccgaaccaggcactccggtaaaagtgctcgattcgggccagcttcttataggtcctcgccattcgtttgaatgacatttttgtaccactcaaaggaatctttcttataccgcttcatggatccgtttccttcattgtcacgatcaacatagatcatgccgtagcgttttttcatttcgccagttgtgaaggagacaatatcaataatgccccacggcgtgtagccaattaaatcaacaccatcgtacgtgaccgctttttctaatgcttcaatatgcgattttaaatattgaatgcgttccggatcatgaaccttgccgtcctcctccagcgtatccactgcgccaaagccattttcaacgatgaataacgggatttggtaccgatcataaaaacgatttaacgtatatctcagcccggttggatcaatcgcccatccccagtcactcgaagtgatatacggattttcgacaccattcggcaagccgccattgacaatatcgccagtgttatcatttttcacatcgcttttcacagttgttgacatgtaatagctgaagcctaagtaatcgacggttccgtttcttaaaatctcatcatcgccgtcttcgaatgtgatgttgtagccttcgcgttcaaattccttcaacgcgtagcttggataataaccgcgaacctgtacatcagggaagaaatagcgctgcctcatttcttcttcagccagcatcacatcttcaggattggaggagaaaggataaatcggcacgtgtgataccatagccccgatctggaactctggattgatgtcttttccttttgccactgctaaggcgctcgccactagttcgtggtgtgccgtttgatacatgacctccttggcgttttcgttttcgccaaccacaacacctgaattcgtccataggaacaacggattgttcacatccatttggttgttgatctcgttaaatgtcatccagtactttactttatctttgtaacgggtaaagcaagcctctgcaaagttgacgaagaagtccacgactttccggtttctaaagccgccatattctcttgccaggtgcagcggcatttcaaagtgagacagggtaatgaccggctcgatcccatgcttcagcaattcatcaaacacatcatcataaaactgcaaaccagcttcgttcggttcagcctcatcgcctttcggaaaaatccggctccagccgatggacgtccgcagacattttaatcccatttccgcaaacaaagcgatatcttccttgtatctgtgatagaaatcaatggcttcatggttcggataaaactcgttctcttcaatcgtatccgtgatttttctcggcacgccatgtgcacctgctgtcatcacatcgacgacactcggccctttacctccttgattccatccgccttcaaattggtgggcagctaaagcaccgccccataaaaaatcctttggcatgtttcccatgtttaattcctcctcagcttacgactgtaaatattttttgatgcaatgcactttcctcaatctcttcaatgaaagctttaacaaactcatcgccttttttgacggtatcgccttcttttaccttcaaggaaaaaggcgtgccgtcaaatgtcaccgtatccagcccgatgtgcgcaagcaattcgacgccggacgctgaacgcagctttgtaggcgccaccatgacaaccgtaataacgccgggatggtggcatcgattttacgatatccttcgctttaggggtagaccgcttcagcaccaatcgaagtctggtagcgcagcgagaagccccaatcacattctcttccccgcctacggcctctaaaatgtcttttgctagtctcgtataatctctcacttccccgacatttcacccacccctttgatttggttgcgctttcattataattgtaccggtataatatatcaataccgaaacaaaatatttacgcactaactatcattgtaagcggtttatgctataattttggcagtgaaactaaacgaataaatgaggaatgcgtatgttaaaataccagcaaatcgcagcggaaattgaaacatatatagaagaacaccagcttcagcggggagacaaactgccagtcctagaaaccctcatggcccagtttgaagtcagcaaaagcacaatcacaaagtccctcgagctattagagcaaaaaggcgcgatctttcaggtcagaggaagcggcattttcgtcagaaaacataaacgaaaaggctatatcagccttctgtcgaatcagggatttaaaaaagacctcgaggatttcaacgtcacctcaaaagttatcgaactagacgtgagaaagccaactccggaagcggcggaaaacctgaacatcggaatggacgaggacatctactatgtcaaaagggtccgttacatcaatggccagaccctttgctacgaagagtcttactacaacaaatcgatcgtgacgtatttaaacaacgaaatcgtctcccactccatcttccattacatccgggaaggactggggttgaagattggtttttctgatttgtttctgcacgtgggccagcttaatgaggaagaagcggaatacttgggattagaggctggactgccgaagctgtatatagaaagtatttttcacctgacaaatgggcagccgtttgattactcgaagatttcgtataattataagcagtcgcagtttgtcgtacaggctaatagttttttgctgtagagctgcttcactatggaaggtggtcgacatgaacaaaatcatcattcctgcaatactagccatctttgcgctctggatattcttacagatttcactagagatgagcatcgttaagaatccaatgaactactttatcgtattcattatctttttcctctttgtaaagatggtgaaagaaaaacaataatagtttactttgaacaggaaaccagatttgacatctggtttttttgtgtttcactttattcatccgtttcaattgtctctaaaagcagttatgcggtactatcatataaaggtccaatgtttaaaaataatgtcatacttttaaattcaccttatcatgcacatgatcatatataggggtttattctaaaaaggggatggacgattttggaaagcaagtacctagatctactcgcgcaaaaatacgattgtgaagaaaaagtggtaacagaaatcattaatttgaaagcgatattgaacctgccaaagggcactgagcattttgtcagtgatttgcacggggagtatcaggcattccagcacgtgctgcgcaatggttcaggacgagtcaaagagaagatacgcgacatcttcagcggtgtcatttacgatagagaaatcgatgaattagcagcattggtctactatccggaagacaaactgaagttaatcaaacatgactttgatgcgaaagaagcgttaaacgagtggtataaagaaacgattcatcgaatgattaagctcgtttcatattgctcctccaagtatacccgctccaaattgcgcaaagcactgcctgcccagtttgcttatattacggaggagctgttatacaaaacagaacaagctggcaacaaggagcaatattactctgaaatcattgatcagatcattgagcttggccaagccgataagctgatcaccggtcttgcttacagcgttcagcgattggtggtcgaccatctgcatgtggtcggcgatatttacgaccgcggaccgcagccggatagaattatggaagaactgatcaactatcattctgtcgatattcagtggggaaatcacgatgtcctttggatcggcgcctattccggttccaaagtgtgcctggccaatattatccgcatctgtgcccgctacgacaacctggatattattgaggacgtgtacggcatcaacctgagaccgctgctgaatctggccgaaaaatattatgacgataatccagcgttccgtccaaaagcagacgaaaacaggccagaggatgagattaagcaaatcacaaaaatccatcaagcgattgcgatgatccaattcaagcttgagagtccgattatcaagagacggccgaactttaatatggaagagcggctgttattagagaaaatagattatgacaaaaacgaaatcacgctaaacggaaaaacatatcagctggaaaacacctgctttgcgacaatcaatccggagcagccagatcagctactagaagaagaagcagaagtcatagacaagctgctattctctgtccagcattccgaaaagctgggccgacatatgaattttatgatgaaaaaaggcagcctttatttaaaatataacggcaacctgttaattcatggctgtattccagttgatgaaaacggcaatatggaaacgatgatgattgaggataaagcctatgcgggtcgtgagctgctcgatgtatttgaacggttcttacgagaagcgtttgcccacccggaagaaaccgatgacctggcgacagatatggcctggtatttatggacaggcgagtactcctccctcttcggaaaacgcgccatgacgacatttgagcggtatttcatcaaagagaaggaaacgcataaagaaaagaaaaacccgtattattatttacgtgaagacgaggcaacctgccgaaacatcctggcagaattcggcctcaatccagatcatggccatatcatcaacggccatacacctgtaaaagaaatcgaaggagaagacccaatcaaagcaaacggaaaaatgatcgtcatcgacggcggcttctccaaagcctaccaatccacaacaggcatcgccggctacacactgctatacaactcctacggcatgcagctcgtcgcccataaacacttcaactccaaggcagaagtcctaagcaccggaaccgacgtcttaacggtcaaacgattagtggacaaagagctcgagcggaagaaagtgaaggaaacgaatgtgggtgaggaactgttgcaggaagttgcgattttggagagtttgcgggagtatcggtatatgaagtgagggatgtggggttcagggattatattctttgggcccatttttacaatcaactataaatcaacaaaaagcctctcaaaatagggttttgagaggctcactatcaaacatgaaaagtacttctattagtgttaggtcttatgacttgatctacattctcagcaatcgatttataattttgtttttttgataaacgatcataatccccaacaatataaaactctttttttgcccttgtaactgcaacattaattaaattaggctttgagcacgaccaatttgccgctccatcactattttgatctgtccccactacaaagtaaacagtgtcggcttcttttccttgaaaggtatgggtagttcctattgagcttcgagtccaatcatttactattttctttggtacatttaattctgctaaccgctttttaattgtttttctgagaccatctttcactgctgtaaagggagtaataacatataaatcaggagcatttaatgtattttcccatttttgataaatctcttcagcaactaaatctgcctgctcttttacaaactgcttattaaccgctactcccttacagtcaaaccattcgcttttcccttgtttttttatcgctaaaaccattttattatcataagcaatttgattagcgattgtaaacattggatttaagcatctcctatgaacccataaaggtatccctatccactgtcctttattgttatacattccaaatggattcgccgcatccgccagtgattgtacagaactccctatttcaataaaccgatcttcaataccataaaatttttttatatctcctaatattgttcgatcaatggtgacaactggttcaatctggattggatcaccaacaacgacaactttttgagacctccataatgcgcctgccgcttgttgcggagtagcttgtcccgcttcatctataaataagtaacgaataaaatcacgaccaactcctttatacattgttcgaacactggcaaaggttgtacttattacgggtgtgattaaatggattacaccccacatatgttgtaaccacattctgtgctcagtctgatttaaatctaacttacttcgataatttaacaaacgcaaacttgattttattgctttataattaaatatcaaaaacaatttgtggactttcattccctttaaaaaaagaagccctctttcaaaattcaattcatcagttagccaaggagtatgtaattgcctatattcatatgcactttgagaattggtccaataattatcatcgggtattactaacccctgatttttgcatttattgttgatagaatccctatatttctttaactccatccttatttgattcgatctcatctgcaaaagatcccattccttttcttcattttttattttcatagttattttttgcagttgatcttccatctgtaataatttgtttctttttgtatgaaatattctttgaaaaaaagttggtttagaaagcgtgtgaaactctctctctaacaaccgtttctgttgtttataatgagctgtctttaatactaacttttcttgttctgcctctagtaacaataactgattatttatatccttatattttttaaaaatttcgcataacgattgtagttctgctttcttttgtttaactgatttcaatgtttgttggaaatctgttactgcattcttccaatctgttaagcttatttttttattttctcgttctaattgctcgatgaatgatagttcaaattcgttattatttctataataaagttttttgtaatagtgagatatattttccgactttcctaaagatgctgagaatagtccccaagtatctgtctcttcacctagaagagcctttgccgcaaaaggaaacatcgataattcctctgcttctaatgcatatgctttttcataagaagaaaatacattttcatctgtaactttacgtataacttccttctttttaggaagatcttttgagatattttcaactgctccattattgcttgaagccactaccatagaatactgattaatagatttatcaatttcataaatagtataatgatagccatctaaaactaatttctttatttttttcagagctttttctgggttttcaaaacaagccattttttctgctttttcaaccatgagatttgcaaaaatatcttttaacagtgtcgttttccctgttcctggcgggccattcacagagcttatcttttgattgttatttataatttgatttacagctacttgctgcattaaggataatctatgttcaacaggtgacggccacctgccgttaggtacatttttaggctgcaacacatcttcaattaaaactctattttcatcaatgttcgttctattatcaaccccttcaataaattgccgtagtgtttcattttctccttgtgagataatatctcctaagtcctctaagaaaaagctatgaaaattatttacccgtccatcttgtccaaccttcaaaatttctttctcaaaataatgaagcgccatattatctattcgtaaaaaataccgttcatatactccaagtactttcttaagggctttttctgttactccatttacaaagatggcatcaacctgttcctcaaataatctcaactgatctcgaaatgtagtcatcaaatcatcatatggcacttcaagatgttcgtttattaatttcatcacatacataagtacaggtacaaatgcagaatcctttacatacttgcctgtatggtcaactaaaaaagacatactaaataacattttctgatctctattaatcatttcttcattattttggaatagatcacgtagatagctaacaagtttatgttgctcaaagcaacctaaatagtaacgaaattgaataaaatttttttcagagtccttcaactgatgcctctcccaaggcctttcagaaaaaagaacttgttctgttttctttcgttgttgaccatctaaaaaatggcttctactcaattcatctcctataccattgactccgcttggtgataaagcctcaactaagtgccatgcccttaatacagaatttacatttatcttccccataattccctcctatttttaacaacatcattcggttattgtcctcaattgatccaactggtatctgtaaaaaatccctaaactgattgatcagtctcttttctttttttcgacacatttgtttaaatattgaataattaactagatcacacattaaaattattagattttagaacatttcattttagtaaaaattcatgactgattcataaactctgagatcatttgttaaatttatgatacgatgacagtaaaaaagacataacaggggctagtcatatgagtgaacttgtgtttgaaaaaagagattttaatacagaacaaattcttgcgttgaaggcatctcgattagataacaatccgattgtatacattctttataacgaaaaaaagaagccgactgcatatattgggcagactgtgcaggctgcacgacgattgaaaaatcatttgagagacaagaagcgaataagtttaacgcgaaccattttcattggtcatgaaagatttcatcagtcagcttcctacaatattgagacaaatcttattaattactttattgccgaaaatcactaccaattgcaaaatgtcagtcagacaagatcgagagaaatgcatcattattatcaaaaagaattttataacgaacatctttttgaggaaatttggaatcagcttcggaaagagaatgttgtcagcgacacccttgaaaacctcagaaataaagatatttacaaactatctccgtataaagagctctctccccagcaggtggaaatcaaaaatgaaattcttgatttttgcaaggcgcatattgaaaaaccaggtaaccatgtcatttctatagaaggagatgccggaacagggaaaagtgtcttactgagctctctatttaacacgattcaggatttatctaaagatgaaaattcacatttaaaaaacaagaacaattacttacttgtgaaccatggtgaaatgctgaagacgtataaaagcatcgcaaacagcttaccaaatttaaagaaaaaaaacttaatgaagcctacctcctttataaatcaaatgtcaaaaacaggggaaacagctgatattgtattagtagatgaggctcatctgcttttaaccaaagaggatagatacaataatttccactatcgaaatcagctagaggaaatcattaaacgcagtagtatcactattgtcatcttcgatcctaaacaagtgttaaaaattaaaagctattggaatgaaaggttgcttgaggagatcaccaatcaatatcatgcgaaaacagtaaagctcacggagcaaatgagaatgaatgcaaatccagacacactaaagtggattaaccattttgtctcaaaacaattgctccctctgccgcaagaaaataatgataccttccaactcaaaatctttgaggaccatgccgactttaaagctgcaattgaaaaaaagaataatgaagtaggtctatcacgtattgtctcgacctttgactatatccataaaaaagatggtgctacttatatggtcgatgaggaaggcattaacatgccatggaattctacaaatgacaaatggacttgggcagaacatgcagattctattaaagaggttggttcaatctatactgttcaaggttttgacctaaattatgttggcgtcattctaggaccttctgtcagctataatagtgaaaaggatgagcttttcatcgacactgcaaaatataaagatacaggcgcattcaccaaacgagatgacatgtctgccgagaaaattaagaaaataaaggaagagattattctaaactctatcaacgtcctcatgaaaagaggcatcaacggtctttacatttacgcaacggatgtaaaattaagaaatagattgctagagttaaaaaggagaaggaaaaaatgagcgaaatcaaagatttaattaacacgattaatgaatttagagacgcacgcaactggagacaataccacaacccaaaggatcttgccatctctatttcaattgaagcggccgagctgttagaagacttccaatggaaaagcagcgaagaagcactcaaagcaaacgaggaaaacattcgtgaagaaattgctgatgttcttatctattcgctgatgctttgttcagatcttaagatggatgtgaaagagattattgaggagaaggttgtgaagaacggtcggaagtatccggttcaagggtaattatatttcttacaataattaaagcaatcttcactcctcaaaaaataaaagtgcatgacgatatatttttggaatgattaacaaatagattgattcttctgaatatattgtagctcaacttaccgctgagtgacagaaattaatcatagatactgagtttaaaatttactttggatttactaatgtaaattattaaacttaggattttattaaaacaggcatattcaagtatgcctgtttactactttaagaaagaagtaacctcattcacttatggtaaggctctccgtagtgtatctacttttgttctagttcttttaaaacctttaagtcttcataataccttaacaccgtactttgcattactaactttctattggcagaatctctaatgttacgaaatttctcattataaaacagagtaaaatcatgtattgtgctaaataaggttatgttagcttgtacccattctgataatgtctcatcagaaaaaggtaagtcatttgattcaaaaaataaactatccaacactgacgaataaggtgttacacttgcaaataactcatcttcaaaaatagtctcattttgatactcattaaataatgaaattatagattcagcatatgttatcatttgatacctaatttctttaactttatatagtacttcatcgttaggcttggtattatcaaaaataaaattactaattatcttatattggggataaaactcaaaatgaacaccttttattaaatgtttattagagcctttcaaactataccaataagtcttatcttgattatcgcttacccaagtagttttacaataataatttcctcgtaaaatatcactttcataaaaagtgaaataaatccatattatatctgatggacagcctttatatctatcttcttgtattttgttattatatacatcgcaaaacagtaatctttttttaatttttgttgagacgtctgctatttctgcatccgagaatggtttcttaagaagtatttttgccgcgtacctttttttagaaccatgatggacaggttccacactcttaatgatgtaatcctcgttttcaaggtaaatattatcttttttataaggagtatactctgaaattttaaaataaattgtacctcctatattagctctatatatagcatgctgaggtgtatccggattatttaaagtatgaatctcaagtaacctctttacccacaactgcaaatcataaagtgaaatttctcccttttttattaaaaatttattcgtcagtccatcgcataaaatatttgtaaatatacttccattgctccctccataagaaggttcaatagcgttactaccacttaatatcgcataaccgctaccttgaaaagattctatagattcttctaaattagtgctttttgtaccttcaactctaaaattacctgaatagcagcagtctataagcaatactttgcttttagctaatgactcgcctattttattaattatgtcctgagtacataataaaccatcgctaaaaacaatattatgaatttcactagaagtcccatgacctgagaaataaaaaataaatatatcatctttttgtaaattgccaataaaaagctcaagggcatgtacaaaatcgacgattgctacatgaccgttatttgtcatacccatttgaaaaatatccatatcatccagctgtaatccttctcttaacgctttattaacattaattatgtctgttttacaaaatggtaaatcaggtgcaccgatacctgaataatcactaactcctactataaatgcctttatccttcccatataaatcaccccagcttcacttgtttatctgattaagattgtaataatcatataaatagacaagcccaatttttattaaagaaaattgggcttgtctatattattctggttgttctaatcgtgattgaatgtttttccagtgtttcttcacttgtgtttccataagatttatagtttttgaatcttcatcaaatatcttctgtgctctttcaacgtaactaataaaattcccatgccctttcttactttttcccaagtgagagtagttcttatataattctctcctatacgatttacgaccgaatttttttgatttacgattgcatatccttactttacgatatgctctcgtataatacttaaaaagacttttttctctaattcgaacttctttaccattaaaactgaaccctagatagtctaatattgtctcatttaagtctaaatcgataatctgattatcgttataaaaataattccctgtcttctcaagttgaatttctaaatttggaatctgttcttttatatcttccaaaattttttgatgaatttgatagttatagtcttgaatgcctccttcaataggaataactataattaaatcatcacaatatcttctatatagcccattttgttctttaacatatttttgtatttttttatcaaagtccagcaaataaatattagaacagactgaactgatacccgctccttgaggaattccataccttttagaattcttgtaaatatttttatgcttaaatgctctaaattccttctctgtgaaatatttataactactttcaatttcactttcagtgtattttgtctttaattctgcttctatagtatctttaataaagtaactaaatcttgttatattcttgaagacattataataatcgtcaggtaaggtatccttttttagaacatagcggattttctctttaagatacctatgatccaatgtatcaaagaaattagtaaagtcagcaacaaaaatatatgcactttgctgcacttttataaaatcaataacttctttagcgaagttaatattactttttccagataagttattccgatatgcagttgcaacttcattaatacctagttcatctacaacagaattatagtggttatttagcttgtccccatagtacttatagatatagctatccatatgagacgcatagaaaattttacgaactttttcttttcgctttttttcttttctgctatatttttgaaatttaatttcaaaatgcataaacgggtaaaaaccatgtttagcaacccatcgagggttctggattttactcttaactttttcaattgattttttattatcaaggtgcttataaccctttacacgatactttttttcattcatatttggcagagctagcaggggtatgtaatcgtagcctattactctctatcaaaaaccctgctagcatactctcctttcgaattatagaccattgctagcctataaagaggctactgaatgcactaatagcttatactataatcagtatattaaattggttgtttatgacgattggaggtatccaaatgccaagttattcagaagcgttatcgattgtaatcgactggataagtattatgattacaattgagataaagcttgacagaaattcaccaatttccctcataactacttttatgaggcgttaaccatattaatattaccatctaaaatttaaatagtcaaaaaagtcaatcaaaagtcatgttttgacctaagatctgaaattaggtatcttgaaaaatataaaatatattatgtaaatatatgagttttttatttttagaagtcgatgatcttcaactgatttgggattcaattaatgatactcaactagttttccacccaatataggcatcaaccggatcgattgattatctgaaattagaacattttacgtaggaaaaagaagtttctttaattcttgatagaaacctttttagtagtttattgtctcttgctaaaaatggtgatctaaaagacactacggaaaaaagaatgattgcttttttaatgttatgggctcaattgaatggaggttccaatcagtgctggattagcaataatggaaaatgcatcaagatacaacgattcttgcaatgctaaaatagagctaaataattttaatgatattttcgatttttatccacctcagatttggttaaatttagctcgtggcacaatagaccagattccaaagtgtaactttttcaatattccatatgaaaactcaatcacttatcatgacactaatgatcacttcctaatgaattatgccagcatgttgcatttagttaatatatatcgagactctgacatggctcctttagaaaaattattagaagtcctaagttggaactttgacaatttactcatctctcaatatatcaatagatatcttgttatgttattttccaatcaaaatggtatcaaagcacctaaacacgctaatagcgatttattagaaagaattgaaaaaggttgtatgaatcaagcatgggatttaacctatctatcatgttggagtacactttactggaatgaatcaaaaacgcatgaggtttttttatttgctaccgccgataatctgttaaagaaaatttttattaacacacataatggtagagatttatttaatttaattaatattgcttttcctaaaagaagtgctgataaaatcattcaattctatattgaaaaaacaagaaacagaattttggggataatccaactcaatatttcaaatctttaattgagaaagaaaaaaagcatttgaaacaatctgtgggttgataattttcagctgtattacctaatgtcattccctttgttgtaaattcaaatatacaatacaaactttaatataaccaaaacagtccctcccccatttgttggggaagggactgttttggtatacaggtaaaatctcatctacttatgatacggctccccacgattaatccgaaaagcccgataaatctgctcaactagtatgagacgcatcaactgatgaggaaacgtcatttttgagaacgacagcttctcgtccgctcgcttcatcaccgcgtcgctcaatccgagtgatccgccgatgacgaaggtgactttgctttttccatatgtagccagcttatctattgtatcggctagttcttcggatgttttcatttttccttcgatggcgagggcgatgacgtggacgtcggggctgattttggataggatgcggtcgccttctttgtcttttatgattttcatgtcctggtcgcttaggttttccggcgctttttcgtccgggagttcgatgatgtcgatttttgcgtaggccgaaagtcgtttggtgtattcttcaatgccttgcttgaggtatttttcttttagttttccgattgtcacaatattgatattcacaggtcatccccactttaaaaacaagttattcatatatgttgtccacaattgtggatatcttttctgtattttgtgtaagatcattcgttccccactatatatactgcggggtctccacataattcacaggctgtggataaactgttagtatgttcgatttttctgatttcgggcggcagctcgtggtcgtctatgtacatatccagcaccgtttcgatgtgttcttcacaagaataatacgcttgtttcatgttcaaatcctccgatgttttcttccatttttacaaatgttctcttctcaatataacctatttattcacatgttagtagtgcttcgggctgagttttatccacaattcgacaaacaagctgttgatgactctatttcgctcgtgtgttagtttggatgtaaccgatgtgtgaggaggtctacatttgcgctttagatgggtttggctttttgtgatcatgttgctgcttgctgggtgtcagccgtcttattgggtgttggagaaggatcgaatcggtgaaggcagtccagacttagaaatatacgctaattaccttcaaatgcatgatgatgtaaaaggatatcaagtcttcaccatatcagaaggcaaaaaaatggtcgtcgtgtctctcggaagcagcgagaacgaaaaacagcttgaggtgtcagacgtcaaattctcacctaaagaaacgattgtaactgtgaaacgaaaacctgcttccaaagctaatgagaaaaacccttatattctgattggactcgataaaatcgaaggggatttaattgtccaagacgaaacaggatatcactttgaagaaacagattaccagcaataaagccggcgttctgagaacgtccggctttttcttttacttcaatgtcccatgcgggtcgatgacgaattttttggctgcgcctttgtcgaagtcgctgtagccttttggcgcgtcgtccagagaaatgacggtggcgttgacggcttttgcgatttgcgctctgccgctcaggattgctttcatcaaattgcggttgtatgtcatggcgggtgtttgtcctgtgacgaaggtatgggctttagcccagccgagtccgaagcggatttttagtgagcctgttttagcgtcggcatcctttgcaccgggatcttcggtcacgtataagcctggaatgccaaggctgcctccgacctgggtgacatccatgatcgagttcagcacggcggcgggcgcttctccttgattgccgtgcccagatgcttcaaagccaacacagtccactgcggcatcaacggttggttcacctagtatttgttcaatttgttcgccaaggcggtcgtgtttttgcacgttgaccgtttcacagccgaagcttctcgcctgtgccagtctgtcttcgttcagatcgccgacaatcacggtggaggcgcctaggagctgagcggagtgtgcagctgccaagccgacaggccccgctcccgcgatgtaaacggttgaacctgtttgcacgccagctgtgtaagctccatggaagcctgtcgggaaaatgtcggacagcatggtcaaatcgagaatcttttctagcgcctgttctttatcagggaatactaaaagctgaaaatcagcgtacggcaccatgacgtattcagactggccgccgacccagccgcccatatcgacgtagccgtaagccgatcccggccggtccggattgacattcaggcacacatgcgttttctgcgttttgcacatcacacagcgtccgcaggcaatattgaaaggaacggatacgatatcgccctttttgataaattcaacatcacgccccgtttcaatgacttctcccgtaatttcatgcccaagcaccaagccttctggcgccgttgtgcggcctctgaccatatgctggtcgcttccgcaaatgttggttgtaatgactttgagaataaccccatgctcacattttcgattcacattcgcctttgggacgccgggcccgtccctcaagattaactccggataaccgatatcctccaccgctacagtccctttgcctttgtacacaaccgctttgtttcctgtcaacgccattcctccctttcatgtgtttggacgcttggtccttgaacatgacttcggtttggcatgaccctttccctttctcacgactgttttttctgtattcttataacaacaaatatgccaagaaagcagccaataatggttccgccgatgtctaagaagtcgactttacatccatttaacaggaatacagtaatggccgaaaccaggctgatcataactgccagaagaataacccgtttggtgcgcatgtaattcctcctttagattcgtttctaaaccatacccaaaatcctctgcaaatttcggttcaacaaaaaaagagacttcacaccagtctcttcataattagagatcaattaaaaaatttcctgagaaataatgtgacaatactggttaccaacgcaatcgccgtatacataacaacccaaaacatgaatgagctattacccgaagctaacgtaaataacaatatcaagctcgcgataaggacgatgagcggtgccacccaaaatcttttaaataaaaaatgaccggctataccaaatacacctgcaatgatcggaaaaccaaaaacgataaataaaacggcgatagctcccatactaacctccttgccctaaaaccccttcatcacctcaacatcatacagcttcaaatgactcttcggcgtcacgacatcctttaccttcccaatctctttttctttcattttctttccggttttcagactgtactgttcaatgtaggcaggcttgttatacgtgtatgtgaagtaatagaggctgctgcctttttgggtgatttctttgaaatcggctttcattttgtcctgggaaagggtgaaggcgatgtttgtttttcctgtcttggcatcgattttgtgtacctttccgaagccgtcaatgaaatacaggttcccgtcataagggaaaaagctgtttttaaagctgaagggcatggagctgtatatcgtttgttcgtcgtttttgtattcggcgatgtcgtgcagctctactttgccgctttttttgttgatcttgaccatttgatagagattgcgggctttttggccgcgaaccataacataaacagcttggtcgtccacagcaagctgggattcgactgaggctccttcccggtactgccattccgatatcttgtggtaagtgagcttcttttgatctgcttgaatctgaaggagctcatagcctttttcgtcagctgtcgggacaagtgcgtaaatggcgccatcatggaaaccggaggctcggatgtagtaggggatgacgtcttttttccactctccgtctatttggcggtacagctctgagcggtatccgtctttctttttgtcgtagccggagttgtataaggtgtaaaagccgtccgtgttttgcagaaagcctgcgctgtcgcctgtgtgctgataggttcttttatgagatctcaggccgtctttaatcgtataaatcttgtttttgtcctccagcatcacactgtcgccgtgaaccttggctgatcccagctcaaggcccttcatctgaaatgaagacagcgacccgtcctggctgataaacaaggcatagcttttcccaccgccaaatgcatcttgatccgcagaggttgaaaaatataacaggacttctttgtcatccaagaaaccggagtctcgaagatcctggtgacttacagttttatggctaggagaaatgaagacaaatagtgcgattcctgcgagaatcagcatggcgatggtaatcatccactttttcatatccttctccttagtaaatggtcatgatggttgtcgtatacgaagaacttgtgatgtcgcgcggatacacgcctaagcctccgttgctgtctatatcaatccctgcttttagcaaaaaggcagaccataggagctttgaacagtttttggcgccgtcatggcccgtatttctgttattgacgaagttaaatgagtatgggtcgccgacttttgataccgcccagtcggcagcagctgttttttgagatgaggatacgctgacggtttgcacaatggagttgtcttccacgtctctggcattatacgcgatctgcctgacgccgtcgctcgggacagattcaacaattttgtcagcggcggagtacatgccgacgtggccatgattgtagtaggctgtgtaggagttcgtgtaatagatattgcctttcgcgcttgtcgggagttttttcgtgccggacgacccgcccatgatagacatgccgctttccttggcgagccggtctccttctgctttatcagccgtgatttccttatagaactgttttaggataacgtcctgctttacgtgctgctgtttggcaatctggctggcagatttcatgatttcttccggtgtcgtgcctggctgcagtgcggcgatttcttcagcataatttgtgttctttacggctttggcgggagaaacgaacaggccgccacacattgtaagcgctaccaaaaacatcgacactcgtttcttcaacttcattacatctcctcttttcttgtgagtgtaggaaagggaatttcctcacccacattatattaggaaaataaggaaagtaactaggttatttacagaatttttagaaatcgtttacagaaaaaggcctttatcaggcccttttcgttaaatcttcttgctcatcactacgtctgtttcttgaaatccggtttgctcatatagctttcgcgccgtctgattatgggcaaagacatgaagggacagcttgcggattcccatgctgcgtgccgtttgatctaatgccgccaatgcttgctttgcgtagccctttccccgatacggttcatataacccgaaatcataaataaacgcttcctgctgcggatgctccggttcagcatgtatccagagccagccaacgatatccttttcattcagcttgaggctccacaaatggtgatggggtgtttccagccctctcggaagcagatcagtaaacgcctgcttagacaaaagctgtgcatcttcaggcagccatgttcccgcttttaccttttcttccgcgtaatgctttgttgtgtacgtgagataagaccgaaattcttctgtctgcattggggtcagcatgattgtcatatcatctctccttcatatattgactagaggattttacataaaatagaaagaggtgttactatcagaataagcaactgagattgataagtcactagagaaaggagtttcacatgaataagatcgcacccgcagaaatcgctagcatgctcaacgattggtaccttgccatcaagaaacatgaagttgaagaatcctcccgtttatttgaagaagtgaagcctttattggacgacatggaagaggatcaggaggtgctggcctacttctccttattggaactgcgccacaaggttttgcttcacgaggcgagaggacagggctttcagcatgaggagccttctcatatgaatgctacgtctgacatgctgaaatattacttttttctgtttgaaggcatgtatgaggcctataaaaataattatgacattgccattgggctgtataaagatgcagagcagtatctcgacaacattcccgatccgattgaaaaagccgaatttcacctgaaggtcggaaagctctattataagctgggacaaaatattgtatccctcaatcatacacggcaagcggtcaaaacgttcagggaagaaactgattataaaaagaagctggcttcagccctgattaccatgtcaggcaattttacagagatgagccagtttgaagaagctgaggcttacttggacgaagcaattcggatcacgagtgaattagaggatcatttttttgaagcccagcttttgcataacttcggccttcttcatgcgcaaagcggcaaatcagaagaagcggtttcgaaattagaagaggccttacagaacgaagagtatgcccgctccgcctattattatcattctgcctacctgctgatacgagagctgtttaagatcaaaaagaaagaacaggccttatcttattaccaagacgtgaaggaaaaattgactgctgagccgaatagaatatgtgaggcaaaaatagacattttatatgccatttatgcagaaggaggtcatgcggaaacgtttcacttatgcaaacaacatatggatgacttgttgtccgagaaagagtatgacagtgtaagagaactttccattttggctggcgaacggtatagggaacttgagctttacaaagaagctgcccactttttttatgaagcattacagattgaagaactgattaaacgaacggaggttatataaatgaaaagatttctgattggcgcaggcgtcgcagcggtaattttatcaggttggtttattgcagaccatcaaacccattcacaggaaatgaaagtcgctgagaaaatgattggataaatgaaaaacccccgcgggtgcgggggttcaatttaacgaaagaatcctaaaacggtttgtagttttaggattctttcatcttttcagcgtgattgaaaacccttgaagtctaggaagaacgagcattggagcgcagcgaatgtttggaattcgtgagcaccgaagcgcaggcctgacaacgaatgcgagggtttgtcgacacgctgaaacccccgcgggtgcgggggttttcttattacagcagcttcttccctagcagagattctacgagctctactgctgttttacccgttttgtttttgtgatcaaggatcgggttaacctcaacgaattcggctgaggtaatgatgcctgcgtcatacagcatttccatagccaaatggctctcccggtagctgatgccgccgacgacaggggttccgacacccggtgcgtcgttcggatcaagtccgtccagatcaaggctcagatggacgccatcacatgctgataaataatcaagggtttcttcaatgacctttgtcatgccaagacggtcgatttcgtgcattgtgtacaccttcatgccgctttccttaatgtacttgcgctccccttcatcaagtgaccgggcgccaatgatgacgacgttttccggtttgattttaggcgcgtagccttcaaggttaaccagtgactcgtggccaatgccgaggctgaccgcgagcggcatgccgtgaatattgcccgatggtgaagtttcaagtgtattcaaatcgccgtgcgcgtcataccagatgacgccgagattatcgtaatgcttcgctgtgcctgcaagcgtgccgatcgcaatactgtggtcaccgcccaggacaagcgggaattttttctcttcaatgactttgttgaccttttgcgcgagtttttcatttcccgccaaaacggaattcaggtttttcagttcctcgtcatttttgattttttcgcggttgatcggaatgtcaccgagatcctcaaccgtataccccatgtctgacagccgctcgatcagatgagcgtaccggatggcactcgggcccatatctactccgcgtcgtgcttgtcctaaatccattggcattccaataaccgaaatcgttttatccatctgtgattccacctcaacatttaagataatgtcctatgcgggttctaacaaagatgacttacggacaacgttttaaagctctagctgacgattcgcctgctggcgttttttaatgacgacatgataaatgatgtagcaaatgatcataaacggtacgccgcaatacagcgcgatacgctgctccggatcaaatgcgagactgatgagcacgaccgtatttaacgttagaccgatcagcggaagcaccgggtacagcggtgttttaaatttcaaatcttctatcttcccgccttcgcggatatatttgcgtctgaacatgatttgggaaagcgaaatcgtaatccagccgacctgtgcgctcatacccgccaaagataacagtaccatatagacagtttcagcctgcgcaaactttgtcagaagtgataggcaggccacagccatcgttacgattaacgagtacatcggtacaccgcgctgatttgtttttccgagcgctttgaaggcctgtccttcattggccattgcgtacagaatacgcgttgatgcgtataaacctgagttcgcaacagataacagtgcgattaaaataacaaagttcatgatatcagctgcatatgggattccgatttgctcaaatacggcaacaaatggactttccacgacacccgcctgtttccacggaatcatgccggcaatgacaatgattgaaagcacaaagaagacaagcgttctccatactgtctgtttgattgaccgtggaatcgttttttcagggtcttcactttctccggctgcaaccccgatcagctcagtcccctgaaacgcaaagttcacagtaatcatcgtaatcagcattgcctttatgccgttcggaaataacccgtcttcataaaaatgtgtcaaaaacggcgcctgctctccgcccttcagatcaatcaggccaaacatggcagctccgccgagaataataaataaaaggataatcaaaattttaatgcctgaaaaccagaattctgattctgcaaaggcttttgtggtgattgcatttaaaataaacatcagtgccgcaaagaccagacaccaaatccacacgtctatatgcggaaaccagcgttgcatcagctgccccgctgataaaaattcaatggcgcatgtaaccgcccagccgagccagtacagccagccgaacgcaaacccgaaggccgggctgataaattttgtcgcataggtctggaaggatcccgacacaggaaaggcgactgccagctctcctaagcagagcatcgtcaaaaacatgataaagccgcccactaaataggacagaaccgcgccgagcggtcccgcttggttaatggtaaacccggttccaaggaagaaaccggttccgatcactccgcccaatgaaatcatgaacaagtggcgcgatttcattgtccgctggagctgatttccgttatcttggtttgtattcacattctgcaccccttcagcaacttgtattggatctaagctggaacatctgcatggtgctatcccagtttgctgtccaaagagcctctatctatttaatataaaattcacttcttctcataaagatacattatactaaaatactgtagctgagcaaatagggagtgctgatttttctgttgtaaatttatacaaacgaagtgaatatcccgccatggtgcggatttatgcgttttgcagcacgtgcttaattttctctatcgcccaatccaaatcctctttggaaatgattaatggcggtgcaaaacgaatgactgtatcatgcgtttccttgcataaaagcccttcttccttcaaacgctcacaatacggacgtgccgcttcagtcaattccacaccgataaacagccctctgccgcgaacttctttaataaccgggttgtcaatgctctcaagctcgcttttaaagtattcgccaagctcaagagaacgatccgccagcttttcatcctccagcacttctaatgaagcgatagacactgcacatgcaagcgggtttccgccaaatgttgagccgtgtgagccagggttaaacacgcctaggatctcgcggtccgccgcaatgcatgagatcgggaacacaccgccgccaagcgctttgcccaagatatacatatccggaacaatgccgtcccagtcacaggcaaatgtcttgcctgtacgtccgagacccgtttgaatttcatccgcaataaacaagacattctcttccttacaaatcgccgccgcttcctgtaaaaatccttccggcggaatcacaatgcccgcttcgccttgaatcggttcaaacaagaatgccgctgtattcggcgtaatggcctgtcgaagcgcttccacatcgccgtaaggaatgagtttgattcccggaagcatcgggccgaatcctcgtttatattcctcttcagaagagagagataccgccagcatcgtgcggccgtggaagttcccgacacatgcgataatttccgcttgattgtcagctacgcccttcacttcatacgcccagcgtctcgccgctttcaccgcagattcaaccgcttcggctcctgtattcatcggcagaatcatctctttgcctgtcagtttggctgttttttcgtaaaacggcccaagctgatcgttatgaaacgcgcgtgacgtgagggtgattttatcagcctgatcctttaatgcctgaatgattttcgggtgtctgtgcccctggtttaccgcagaataagcactcagcatatccatatattcattgccttccgggtcctttacccaagcacccagcgcttcagaaataacaatcgggagcggatgataattgttggctccgtaatgagacgtctgatcaataatttctttggatttagataaagctggcatatttgaattcccccttgttttctgtttcaacatgttatcctgctttccctttatataaatgcaagttctgtgccaaatcaagaattcgtgtgttttctacaattttcgaggacaaggtgcaaaaacattctgatatttcgagcaaaaatttcagcaagtgcaaaattcttttgcataccctctccatttttttataaaatagaagcaatattaagaaaactgagggaggttcatacagtggtcaaagacagcgaattcctcacattggtttttcagagcattttagatgaaatcgatgttggcctgcacgtggtagacgagcatggaaacacaatcgtatataacaataaaatgatgcagattgaagatatggagaagcatgacgtcttgaataaaaacctgatggatgtgtttatgttttcaaagcagcaggacagcacactggtacaggctcttcaggaaggaaagacgattaaaaacgtcaaacagagctatttcaataataaaggccaggaaattacgacgatcaatcatacatatcccatcgtccaagacggcaaaatcaggggcgccgttgaaattgccaaggatgtgacaaagcttgaacggctgatcagggagaatatgaacaaaaaaggcagcacaacctatacgtttgacagtattctcggcaccagtccggccattcaagacgtcatcgaaaacgccaagcgggcaacccgtacgtcatcatctgtccttctcgcaggcgaaaccggcacaggaaaagaactgttcgcgcaaagtatccataatggaagcgatcgttctggcggcccgtttatttcgcaaaactgtgcggcattgccagacagccttgtggaaagcattttgtttgggacgaaaaaaggcgcgtttaccggcgctgtcgaccagcccggcctgtttgaacaagcccacggcgggacgctgctgttagatgaaatcaactcgctgaatctcagccttcaggcgaagctgctgcgcgcccttcaagaacggaaaatcaggcgcatcggttcgacaaaggatacaccgattgacgtacgtattattgccacgatgaatgaagacccaattgatgcaattgcaggcgaacgaatgcggaaggacttgtattacaggctgagtgtcgtcacactgatcatcccgccgctacgggagcgaaaagaagacattttgcttctcgcgtcggagttcatccagaaaaacaaccatctgttccaaatgaatgttgaacacatcagcgatgacgtgaagcaatttttcctttcttatgactggccgggaaatattcgcgagcttgagcatatgatcgaaggcgcaatgaatttcatgacggacgagcaaacgattacggcttcccatctgccctatcaataccgaatgaaaatcaagccggctgacattccagagcctgaaacaccaagacaccagccggccgcggacttaaaagaaaaaatggaaagcttcgaaaaatatgtgatagagaatgtgttaagaaaacacggccataacatctcgaaagctgctcaggagcttggcatcagcagacaaagcctccaatatcggctgaagaaattttctcactcgtctaacgaataatccggagcaggaagcctgatcagaaaaacagtgcctctgccgatttcacttttcacttcaatcgtcccattgtgattgtcgataatcgatttcgttatggcaaggcctaatcccgaacctccatatttccgggagcgggatgggtctgccctgtaaaatcggttaaataaatgcggcaaatgctccggcgcgatgcctgtgccattgtctgctatcatcagcatcacgccggaactgcctttttgcagagaaatagtgatggcaccggttctctcatttgtatactgcaccgcgttataaaccaaattcagaatgacctgtttcatcttatcccggtcaaacaccgctttagcatcatcctcaagcagcagctgcagccttctttcttttgcaagcagactgagctgcggctccatttcccttatgagcgcatcgagatttcctctcttcatttcaaagctcggcacccgatcaatttttgctaaaaacaacagatcctctatcagccgagtggctctcttcgactcttcatacatactattcagcgccctatctctctgctccggctgaagcgcggcgccacgcagcagcacttcgataaagccgtgtatggacgttaaaggcgttctcaattcatgtgaagcgtctgatacaaattgccggatgcgctccttcgcctctttttctgctttaaatgacgtttcaatccgctccagcatgcgattaaacgaaatagcgagcgtgtcgatttccatttgttttcgatatacaggaagccttttattcaaatttcctgcattgatttctcccatcatatgtaccatttgtgataacggtttaagcgtatgtctgaccacaggcaagaacgtgaaaagcccgagcaggagcgcaaccagcgagagcgtggaataaatgctgatttgccggagcagtacgtccttcagtggttctgttaaagtactcatttggatcacgcctgcttcttttccatcaatagtaatagcctgaaacacaatcagcacttcctcgccggattcatttttcgtgattttgtaatgcaaggccatcgtatcttttaatgcctcatcatatacactttttttcactgttggcggtgctcccgcatatggatcggtcgacaataccgtactgtcttttgttttcttatcgataaaaacaatggtcacgcccggatagataaaggcgggacggacagcaccatctgacttttccgagctgtcgggatggcttttgtatgttttaatattattccagatggttggctccgttgagttgatataactttgaatgctgacagctcggttttcatataagaggcgttttccaaacacatattgcatagcgccgacaaacaccaatagaagaacgagaatgcataatgaacggaataaaagctgaaagcgcagtgttttgaatcgttttttcattcaatatccacccgatagcccgcaccccgaaccgttcggatcacttcatgctttttgtcattcaatttttcccgcaaggaacgaatgtacacttcaacaatattctcttctccgtaaaaatcatacccccatactttatccagaatccttgctttactgagcacaaggccgtgattcagcaccaaaaactttaaaagctcgtattctgttgctgaaagcttgagcacctcttcctgatagcggatttctctgcgccgatcatcaattcgaaacggaccgagcgcgaattcttcaaacaggttgggaaagtgatcccgaattctcgcatagattcgcgccagcagctcttcaaagctgaagggtttgatcatataatcatcagcgccctctgtcagcgcttttacccgaacccccacctcatccttggccgtaagcataataaccgcggtatggccggtttttttcatcatcctcgatacttccagtccatccattccgggcatcatcacatccaagatggccacatgcggctgaaatgtctttacggtgttcatcgctgtcattccgtcagctgctgtcttcacttcaaagccttcattttcaagacccattgtcaaaaaatctaatatcgccggttcatcgtccacgagcaaaatcttgatgcctttcatcctattcatgctgtgctctctccttagttggcataaacctctgattagttttttcccttcccctcctattattcgtttttacctgaaaacaaactgaatcttccctaaaaatcagctgaattcagcaagttttcagccagccctcatttgattttcagcttcggcctatacaattgccttagttggtacagccaacaatgaaataaaggaggaatctcacatgaatatcactaaagttttatcaggagctgcactgggaacgattatttcaatcagttctttcacttctgctcacgccgctgtcattcaaaaggatgatacatcaacgaaggttgagacgaagcaacaggcttccatcacaatagcaaaggcaaaacaggttgctttgaacaaatgcaaaggtactgttcaatcagcccaaatgaagaaagtgaatggcacatacgtatatgttgtgaaagttctcggtgaggacgacaaacagcatacgatgaacgtcaactgcaacagcggcaaagttgtgaaacatgatgttcaaaagaaacaaagctatatcagcaaaacaaaagcccaatcgatcgctttgaaaaactgcaaaggtgcggttcaatcttctgagctgaagcaagaaaacggtgtttacgtttacgtcgtaaaagtaatgggtgaagacggaagccttcacacgttccatatcaatggagaaaacagcaaagtcgcaaaacacgagcaaaagaagcaagcacatctttctaaaacaaaagcgcatcaaatcgcactcaacaaatgcaaaggcgcagttcaatcttctgaactgaagaaagaaaacggcgcatacatctacgttgtcaaagtgcttggcgaagatggaagcactcatataatccatgtcaactgtgacagtggtaaaatcgtaaaacaagaagtgcaaaagaaaaacgcagccgttacaaaaacaaaagcacatcaaattgcactaaataaatgcaaaggcacagtgaaatctactgatttgaagaaagaaaacggcacattcgtttacgtgattaaaatcactgcccaaaaccacactgaacaaacagtgaaagtgaatgctgaaaacggaagcatttgcaaataaaataaactgcctgccagcagtaaaataactgaaattcaacgtataacaccagtcttgttttaacacaaagttctaagttcatgtctacctttttctaaatactcttttaaactgaacgtgcgtgacccgcgttcagttctttttctaaggaggacctacaaatgaatatgaaaatatgttctgcagctgctttaggagcgatcatttcaatcagttctttatcatccgcacacgcggctgttctgcataaagaagacactgctaaagttcaaacccagcagcaggcttctattacgctctctaaagcaaaaactgtcgctttaaagaactgcaaaggcgcagttcaatcagcacaaatgaagaaagcagatggcgtttatgtctatgtcattaaagtgcttggtgaggatggcaaaattcacacctttaacattaaccgcaacagcggaaaaatcgtcaagcatcacgttgaacataaacaagccgcgatcacaaaagcaaaagcacaaagcattgcgttgaacaaatgcaaaggtactgtcacatcttctgcattaaagaaagaaaatggcacctatgtgtacatcatcaccatcacagccagcaaccacacggtacaaaccattaaagtgaatgctgagaatggaggtatttgcagttaacagccatttgctgctgtttcacgtgtaacatccatcttgtatttttcttcatattcgatatatccttttcaactgaacgggcgtgacccccgttcagtttttttgcatatcaaaacagcctggcaaacgatgccagactgttttgattaacttcctaattggtctgcggaggacagcttgatgtctacagatttttcttttccgccgcggtaaaacttcaccttcacccggtcaccgacttttttctgataaagccgttttcgcaggtcaacaatatcatttactttgtatccgtcaaatcccgtgatgacatccagttccttcagccccgcttttccggcaggtgaaaaggcgtctacacccatcacaaccgctccattggtaacatgcttaggaagctttaatgtttcatcccaatgatagcttgcgatgtcgcttagcgatttcatctcaatcccaaggaacgggcgtttgacctttccgtatctctctaaatcctctatcacagggatcacgagcttagatggaatcgacaggccaatcccttcaaccgccgactcggcaattttcattgaattgatgccaatgaccttcccatccatatttaacaaagcaccgccgctgttcccagggttaatggccgcatctgtttgcaggacttctgcgttccagtcaggctgtccatcaccgtttgaatctactgggatcgccctctccgtacccgagatgacgccttgtgtgacagagccagcaaactcaaggcctaacgggttcccgatcgcaataaccggctccccagacttcactttatctgaatttccgaaatcggcgactgctttaattttatcgcttttcacccgtaaaacggccagatccatcagctggtcgctgccgacaagatcagctgatacacgtgagccgtctttcaagctgatttcaatttgggaagcgccttcgatgacatgatggttggtcacgacataagcggaatggtcatttttcttatagatgacgccagagccgctcccagcctcgccgctctctccccgtatatctgatttttggatgttcacaacaccgacaacggcgggcgacacattgctgacaatcttggtgaccgtattgttgacactgacattcaccgtcctgattgattcccggccgttattgttctgctgctgatctaaagcgcccgtatctagcccttcatttgaaaggtacggcatgataaacgccattaatacggcaccgacaatcacgccaatcaggcttgaaagaaaatatccttttttgcttctctttggctgttcaggagtagtatgttcttcctcacgttcgtaatccaccatattccatcctttccaagaacgttaatatggttatattgtgggttagaagctcctagaatagtcatgatttacatagaaaaattatacagcgcaaagcggagtggccttcttcggatcagtgtcgtataagtcaaatgtctcacccgtcacaaatcctttagaagccaatgtctgctgcacggacattcttgccagctccttcatgttgttgtcctggctcaaatgcgccaggtaaatacgagacgtctcatcgccaatgacatccgtcatcgccaaggcagcatcttcatttgaaacgtgcccgacgtcacttaaaatccgccgcttaatgctccatgggtatcttcccatttgcagcataccgacatcgtgattgctttcaaacacaaacacattcgctgaacggataatgcctttcattcggtcgctgacatatcccgtatctgtcattaacgcgagctttcggccgttataatggaacacataaaacatcggttccgccgcatcgtgggagacgccaaacgattcaacatcaagtccgccgaacgacttcaccgtctccatcggaaatacaaacttttgatcggtgtcaattttgccgatttgattctccatcgctttccaagtcttctcattcgcatagatcggaagcttgtactttctggcgacgacaccaaggcccttaatatggtcactatgctcatgcgtcacaaaaatgccgtctacatcatccagcttacgcccgatctgcgccatcagcccatccatggcttttccgctcaaaccggcgtccactaaaaatgcgtgatcctctgtttcgaggtaaaacgcatttcccgtactcccgctcgcaagtacgctaaattgcaagctcatgtttgtctcactccattattttcattgatctgtatctaaaatcgtactctccaaagcattcacagtaaaatactcttgtactgtctttttctcaccgttcacttttttctcgtactcgaccgtaattctccataccggcgccagcacctgcgtacttgtcagtggatattgtgctacatagccgaatttacagctcttcacagtgctgtattcttttaattgattttgatagtacaatagctcaaccgcatccatttcagtaattaagctttctttctggatttgcttgaaggtctcaagcgttgtctggtcgtacgacacaacctcgtttttaccgtttaagtgcaataccacttgcccgatcatattagcgggattatcggtcttttggtaaatataatggccttcgtacgtttggaagaaaataatttctttcttcgatttattaaccttccaaagcttatatttttcgccatcttgaatctttgaagaaacaagtgcctgagcatcgtcctcgatatccttctttgatagggctattggatttgcaaacttcattttcaggctcgttactttatgatcatcactaggcatgtccatcaaaggcttttgatccttcagcgcctcaatttcctccttggtgaaggctttttgatttgccgtgatccgatagccttctgtcgcttccttattcaagccttcatacgtgatatgatcggccttcatgtcatgctcgacatcatttttaatgacttcatattctttgccggtagcctgccatttttgaaaaaactgatagcctaagaaaatatctaaaatgaggaaggcaacgatgaagattgattttgtcttattccactccactgttagccccctccttcctcaataaatcctttgtaatcggcacaatttttccatttactttcatcgcccaaaccggttccagttcaacgagaggatcatcgttggttgatgttgataccaattgataagcaaggaagatctgatcaattttgtccgtatcataagcggtttgtttcgaaagcagcatcctcacttcgctgccgctcatgagctctgtttcacttgttttaatcggattcgttccgagactgtaattcggccgcttatagctgagaatatcatcattcgcccattgcaccgtaatcgccgatgtcgccccgaaaggtttggtggtgctgttaatgaccgggatctgatccataaagatatagaaactcagctgctggctgtcattgatactgaaaaattgatagtgatccgtccagcttccggtatcctcaaggtatttttggctctttttgattaattcacctgtttgataggatgtgctctgcaccaaattgcgctgttgaaattgcacctgtcgctggcttagattcacatctaaacggctgatcccatctgtcagcacatttctgttgttgtaattcgaatcttctcttacaatgctcggatcactaaacaaagcctgcttaaaggtatttgttttaatcgattctgtgacaaattcttttttgtccatcgtaagcggtttgttcggcagcaagaactctttctttgagccaatggagaacaaactgaacgccggcatatttgattgcctgtttttcaagtcgttcataatgttccggtagtttgctgactcaaccgtcacttcaagaatgagctgtttgctgtaagacaccaaatagattttcttgttcgcttttgtttcattgaacgggatcagaatatggtcaaacgaactgtattcaaacgactgattagaccatttaaacagcgtttggaaaatatcaatcggaatcgtatcgctgaattgcaagtcaagcttggcttcagaaccgcctattccataaaaccagcttttgaatccagccttgtcatactgatccgaaatatctttaattcctttcacatcccaatgtggcaagtcagaccaaatttcttcatagagggcattgtcatccactttgtaatgagcgccgtcatcatggataaacatgtcccttggccttaccgtttcagacagcttttgagtggttttttcgattttatgtttcacacgaacagtagactctgttgaggatgagccttcagaaaagtttggctggaacgtccatatcccccatgtaaaaacaagactgatgacgacgagtaccgtaagtaatatcgtttttatattttcacgcttcatcccaatcatcctcttgttcctctttatatggaagagtaaatgtaatcgtcgtgccttttccttctatgctgtccgcccaaatatctccgccgtgcgcctgtaccatttccttggcaatcgccaatcccagaccggtgccgccaagttttctcgttctcgctttatccaccctgtagaagcggtcaaagactttttcgacatcttttttcggaatgccgatcccttcatccttcacgctgatatagagaagttcttcctcttcattgacatcaatcgagaacgtgacatgtccgccttccggtgaatattttaaagcgttagaaataatattatcgagcacctgcgtaattttatcctggtcgatctcgacgtacagatctctgtccggcagattgcggataaactccacatgctgctcttttgtcatttcaaaacggtcaataataagcgacataaaccggacaatctgaatccattcccggttaaattgataatccttactgtcaaatttcgacagctgaagcagatcattgacaagccggatcatacgctctgtttcattttgtgtcaccattaagaagcgcggagcaatgtctttattttcccacgcgccttcagctaacgcttctaaatagctgcgcattgtcgtaagcggcgtccgcagctcatgtgatacattcgcaacgaattctctgcgttcctgatccattttctcttgttcggttacatcgtaaatgacagcgattaaaccatcaattttgccgtgttccctttgaatcacagagaaattcacgcgaagcaccgttaattcatcatcgcgctcaatttcaagcagcatagaatcctgctgctccactaaatcttcaaaagtataattctcttgaagccccagcaaactcgtaatcggcatttctaaggctgtttcacgtgaaacgttcaacagctccagcgccgggctgtttaagagaataatcgctccatttcggtttgtagcgattacgccgtctgtcatataggcaatgacagaggctagctttctgcgttctccttcagtcatcgcctgggcatcttcaagctctctcgttaagtggttaaacgttgtggccagctgcccaatttcatcatgcccgtactttttaaccttcctcgagaaattccctttcgcaagctccatcgcctgctttcgcatatctgaaagcggatgggtaatggttcttgccagaaaaataccgagaagagccgtcaaaacaagtgccaaacctgtgccggacgccaatatcgtgttgatcgtcttcatttgattaaagacatcttccatactcgcgacaacatagatcgcgccgacaacctcttggttttcagtcatgacgggcttcgcggaaataagaactctgattttgcttttcgggtcataatattttcttaaatacgactgtttggtagaaaaaattcttttgaaaatcagatcggtcgtttgtttccctgccacttcctcaccatacggctttgaagaaccgaccacttcatagcttttatctacaaagctaatttcccgaacctcatcacttttcgtgaagtcattcaaaatacggctgacgtcatcctttatgacggtgctgtcgttatcgctcttatattcttgttcgatataataagaaaggttgtcgattcgctgattcagcgattgttcataagagctgatcagcgacttctctacctgattgacaaaatacacaccaatgatttgcatggcaatgataatcaaaagtacataaatcaaggtaatcttaaattggatcgaccgaaaaaaaccaaccttattcatatggtcattagtcctgttctgggtttctcaagtaataacctacaccgcggcgtgtgacgatccaatttggatggctcgggttgtcctcgattttttcacgaagccggcggactgttacgtcaaccgttctgacatcgccgaagtaatcatagccccaaacggtttgaagcaaatgttcacgagtcatcacttgtccgatatgttttgctaaataatgaagcaattcgaactcacgatgagtcaattcgattgtttcgtctcgttttgatacaacgtacgcgtcagggaagatgacgagagagccgatatgaatctcgttagaggaaggctcttcctccgcaggcgctgttgtcagctggcggcgcaggttcgcttttacacgtgccaagagctcgcgtgtgctgaatggttttgtgacatagtcatcagcaccgatttcaagcccgataaccttgtcaatttctgaatccttagccgtcagcataatgattggcatatcgtatttctttctgacttcacggcatacttcaacgccgtctttattcgggagcataatatctaaaagaattaaatcaggctgaagctcttctaccatttcaacggcttcgtttccgtcgtgggcacagtgcacttcatagccttcttttcttaagttaaattccaatatatctgcaatcggtttttcatcatctactacaaggatctttttatccatcattttgattttcctcctgccgaatgacttcatttcatctatataacattcgtttcatcacttatggcccatgtaaagaatgggtccttgtctattataacggtttaaggtcaaaagataaaaaaaataaaggtttagaaaaaaaacacatgtttcacctttatcgccagttgtttatctattgtcatgctggtcaactttttttaaaaaagataactttattgaaacctcccttcaccggagtgcgtctttatcaatgacgtcttcttctttgaaccggccgcagggccggttctccctttttcttctattataacactcctcatgtttgcctttttcctaaaagaaaaaacgcacctacgattgcagatgcgtttggtaagtggctcgggacggaatcgaaccgccgacacacggattttcagtccgttgctctaccaactgagctaccgagccaaatgttttatttttctctactaagtaaagtaaaatggcggtccggacgggactcgaacccgcgacctcctgcgtgacaggcaggcattctaaccaactgaactaccggaccttacagtaattgcccggagagctgtcgtgtcagctctcacagacaaataaggaatttagcaataacgctaaagtaaatcaatgacccgtacgggattcgaacccgtgttaccgccgtgaaagggcggtgtcttaaccgcttgaccaacgggccttcacgaaatggtgagccatgaaggactcgaaccttcgaccctctgattaaaagtcagatgctctaccaactgagctaatggctcttaaagatgtcggaatttctatagagcaaacgacttagatctagttctcatcttgtactctattgaagcagtttccgtaacaacgagatttataatatcacgaacaaatagaagtggcaataacttttttggttttttttcatatttttttctcagaccaacttatatgcagctttcaaacaaaaaacaagccccttatataggggcttgcagacatattctatttagttcgcacggtacacactgcgaaggacatttgtttgtgagcggtctggaccgacagagaaaatagaaagcggaatgcctgtcagctgagacacacgctcaagataatggcgcgcattctccggaagctcgctcaagctcttcgcacctgtaatatcctcagtccagcccggcatttcttcatataccggctcacattcagcaagtgccttaagacttgctgggaattcttcaatgatttcgcctttatagcggtacgccacacagattttcaacgtttcaattcctgttaggacgtcaattgagttcagagaaagatctgtaattccactcacacggcgggcgtggcggacaacaacgctgtcaaaccagccgacacggcgcgggcggcctgttgttgttccatattcgcgtccgacttcacggatttgatcgccgatttcatctttcagctcagtcgggaaaggaccgtcgccgacacgagtcgtatatgcttttgatacaccgacaacgtgcttgattttggtcgggccgacaccagaaccgatcgtgacaccgccggcaaccgggttagatgacgtaacaaacgggtatgttccttggtcgatatcgagcataaccccttgtgcgccttcaaataatacacggcgcccttcatcaagagcatcgtttaagacaacagatgtatcgcaaacatactttttaatctgctgtccgtactcataatattcgtctaagatatcctcaagtttaaacccttctgtctcgtacattttctcgagaagacggtttttttcttcaagattgcgctcaagcttttccgcaaacgcgtcacggtctaacagatccgcgatgcgaattccgatgcgggctgctttatccatgtaagcagggccgattccttttttcgttgtgccgatcttgttagcccctttacgctcttcttccacttcatccaatttcaaatgatacggcaaaatgacgtgagctctgttgctgattctcaggttatctgtactcacgttgcgctcatgaagatacgcaagctctgtgactaatgctttcggatctacaaccattccgtttccgattacacacgttttatccttatagaaaattccagacgggattaagtgaagcttatatgtgattccgtcaaacttgattgtatgccctgcgttatttccgccttgataacgggcgatcacttctgcattttctgataggaaatctgtaattttaccttttccttcatcgccccattgcgtacctactacaactactgaagacatgtccgtgcacctccgttaacctttcaaaacgattctattcaaacaaatcaagtttatcagtgaagaaacagaaagtcaattgtaaatccgaacattaaattattgtaaatctatattcgttcgctttcattcgttttataagcgttttctcacggttttgtcataaaaagcttgcgaaactttcatcctttagcataagaaagaatcacttgcctgatatcccttttgaattcataaaaacgacccgccagccgtccgggtcctctatcgtcactcccccattgctccagtacgggttctctgattcgacctcttgatagcccatgtgctttagctttgaagtgatcgctgccagttcatctgcattcggcacataaaaaacaagaaggctgtcgggatggggaacgggggcagtgcttccaccttcatactgggtgaattccaaatgataatcggcatgaggaaggccgaacatgacaccgtcatacccgttatgctgtgaaaattctcctattcgtttcaaacacagtccctcttcgtaaaaacgaataatctcatcaagctggcccgtaggacgcgcaattcggatttgtgctgcgtgaaaagacgaaaaacgtttttccatattgttaccatctcctttttgcaccattttattaaaacgctttcagattttcatccgctgagcgaacggtatttcttccatctttcgaatgaaaaaaaccccaagagcagctcttggggcttatgcgccgggcggaactcctgcgtcatcaaaacgccgttccaggttgacgaatttgttgtattcttttacgaacgcaagagacacggttcctaccgggccgttacgctgtttggcgataataatttcgataatatttttattctcggtttctttgtcatagtagtcatcacgataaaggaacgcgacaatatccgcgtcctgctcgatacttcctgattcccggatatcagacatcatcggacgtttatcctgacgctgctcaacacccctggaaagctgagaaagcgcgataacagggacttgcagctccctggcaatcgacttcagttcacgggaaatttcagatacttcctgctgacggttgtcctttgaacgaccgcttccctgaatcaattgcaggtaatcgatcaaaatcatgcccagcccgctttcctgcttcaagcggcggcacttggcacggatttcactcactcgaatacccggtgtatcgtcgatgtaaatcccgctgttcgacaggcttcccattgccatcgtcagcttgccccaatcctcttcggtcaggttacctgtacggagattctgggcattgatatttccctcggcacagagcatacgcataacgagctgctctgcacccatctcaagactgaaaattgctacgctctcatcggtctttgtcgccacgttttgtgcgatgttcagggcaaaggctgttttccctactgacggacgggcagccacaatgatcaagtcgttgcgctggaaacccgcagtcatccggtcaagctccgtaaaccctgttggaattcccgtgatatcaccttttcgattgtgaagctgttcgatattatcataggtctggacaaggacgtccttaatattttggaaggcactcgtgtttttgcgctgtgccacttccataatcgttttttccgcttcactgagtaaatcctcgacctcatcctcacgggtatacccgtcttgagcaatcgttgtcgcagttctgattaatcggcgaagaatcgatttttcctcaacgattttcgcgtaatattctatgttagccgctgtcggcaccgagtttgcgatatctgtcaaatatgaaatgccgcctacttcttccagcaggtctgtgttcgcaagctctgatgttactgtcaccagatcaaccggttcacctcggtcaccgagcaccagcatcgcattatagattttttggtgggacattctatagaaatcatctggaatcaatacttctgaagccagtgttaaagcagacggctgtaaaaaaatagcgcctaacacggcttgttcggcttctatattttgcggaggaagccggtcattcagaaggtctgtcatgctaagcaccgtcctctcattaaaaaatctccaacctccattctaccatttctacagaaaaaaaatagaaaaattgtctgtttcctgtttttttcagttagcagattggatcgtttcggacagtaacaaggcgggaaaaatgcaataaaacatgagggaggaatgaaagatgataaagaaatatgcgattacgcctaatgttgatgcggacggctggtttattgaggtggagaatgtagcgccgacagctttgtatacgtctaaagacgccgctattgaaaaggccaaacaggtggctaaggaaaacagtccgtctaagcttgtaatttatgaccagtttaaaaatgtggaagaagaacactcattttaatgaatgaaagccttcgctgcagcgagggttttttagcggttatcggtttatttcatccattggatgcctatgtgcatcatcaaatctgccgctttttgatacagatcccactccccgatcgaagcaaatttccccatcagctcccgaagctttagcctcactgctatatattcttcgaaagtgacagctttttcagtgtctatttggtgttccttcagcatttgttttaataaagacaacggtgcgtgcataagaaccctccttacctcttttataacggtcattttccgattgctctattcctttgtgacatcttcttacatttcacatctgattcttgtacaatggacagaagagaggagggatcttttgtgagacctttgcaaatttctgctgaaactgcacaaaagcttgcagagtccttgaatctgccgcttgaacagatcatgcatatgcctcagcatattctgcttgccaaaatggctgaactgcaaaaagaggacaaatcatagccttcattcacatacttgcttacctgtttcgggataatatcatgtatatgttagaaaagaggagtaactgctttgccacatccacataataaaaaaatccaatcattttggctgatcaccggcattatctttatcgcctttaacttacggcctgcgatcacttcagtcggtccggtcatcagctctatccgggcagagctgcacatgtccaatggggcagccggttttttgaccgcactgccgctgctttcgtttgcagttctttctccgcttgcacctaagcttggacaacgcctcggaaatgagcgaactttatggctaggtctcgtgatactgcttatcggtgttttgactcgttctaccggctatactgccgctttgtttttcggaacggcacttatcggcgtcgggattgcgattggtaacgtacttttgccaagcttaatcaaacataaataccctgaaaagccagggatcatgatcagcctgtatacgacatcaatgaatatattcgcagctttagcatcgggtgtcagcgttcctttagcgacccagatgaatcgcggatggaaacaagcctttctcttatggggcgggctggctttgcttgcattgctgatctggatacctcagctgcgccatcgagatacggcaaaccagacaatgaagctgcaatccagttccatttgggcttccaaaatggcatggtatgtcaccatctttatgggcctgcaatcgtttttattttacagcagcatcgcttggtttcctgaaattctccgttcacacgggattgatacggcaacagccggatggatggtatcactcatgcaatttgcgagtctgccttccacttttctgacgccagttttagctgaccgtgtgaaacagcagcgcggtatcgttgcggcgctggcctcagtttatctgatcggcctctgcggattattagcgggcggaagccatacattgcttgccatctggatgatcattatcggtatcgggcaaggctccagcattagtctggcgctcactttgattggtctccgcagtgaaaatgcccaacaggccgctgcgctgtcaggcatgtctcagtcattcggctacctgctggcagcagtcgggccaatctttgtcggctatctctttgaccagacgcattcttggacgatgccgattgtgcttctcattgctgccctgatcgtaatgggagcagccggacagggagccggacgagatcgatacatttttcagtctgaaaaaaaaagaaattcagcataaaagcggggaaaatatctccgcttttttctttgaatatttatggtttattcataagtttttcatatttgttttttacaattagacaccataaagaggtgaaaaacgatgaaaaccaaacgattcgacgcagcccttatttttattttgctgggagcagcttttttgaatacgtatcacatttggcaggatgatgcagcgaaccagtactatttggcggctgtaaaaagcatgacgcaaagcttccataatttcttttatgcgtcatttgacccttctggatttgtgacagtagataagcctcctgtcgtgttatggattcaaacgattttcgcactgattttcggtgttcacacgtggagtgtcatcattccccaggctcttgccggagttggatctgtcttccttctctacagaatgattaagccgacttttggagttggagcggcccgcattgccgcacttgtcatggcactgacccctatcgcagtagctgtcagccggacaaacaatattgatagcatgctcgtttttaccatattgctcggttcagcttgcctgtttcgggcagtaaaacaaggcaagctggtttggctgctgatggcatttgccctgattgggctcgcctttaatatgaagatgatgcaagcgtttatggtattgcctgcatttgtgttattctacctggttgcatctcgggtttctctgaagaaaaaaatcgggcccctgcttctgtctcttgtccttctgacaggcctttcactctcatgggcgattgcagtggattcagcctcttcctcaagccggccttatgtaggaagcagccagaccaactcagtgctagaactggcctttggctacaacggcacagagcgtctgcttgggcaaactacgggcctagcaaagggtgatatgaatgctgctggcggagggaacatgcagaatcaagacaacatgcaagcgccaaatggcaacggttcatctttttctcagaacggaaatcaatcattcggaaaccattcacaggcgcctcagccgcctaacggacaaaccggcgctctcaatggaggcggaggcacacctcccacaggtggcaacgggcctggaaatggagggcctggcggcggaaaaagtatgaatatgttcggcaccggtgatcctggcccgcttcgtcttttccaatcagcactttccggccaaatcagctggatgcttccattctcattgatcggattactgggcgcaatcgtcagctggtaccgtgatcgccgcggacatgctgctaaaatgaaagaaacgctattctgggcggcttggcttgttcccgtggctggtttcttcagcatcgcaggattcttccaccagtattatttgattatgctggcaccgccgattgccgccctttctggtatcggatggtatacgatgcaccgcttatacaaaaataataaagactggtccagctatcttctgccggcagccgtcttgatcacagccgtgtttcagatgtatattctgagcgcttatacaagccaaatcggcagtgtatggatgtatgtcctggggctcttaggactgggcatcacccttgcacttctgatgcttaaacgcagccatccgttcagtaagctgctgaccatcatcagcttgtgcgttctgcttctcacaccagtttactggtcagcaacgccgcttctatacggtggtaacagcgtccttcctgaatctggcccgcagctcaaaggctcagcaaacggcgggaacatgttctcttcagaggtcgacagcgggctcctgtcctatctgagaaaacacaataccggcgaagaatacttatttgctactttgacaaccgtaacagctgcgccatacatcatttacgaaaatgaatctgttatggcaatgggcggatttaacggcacggatcccattctgactgtgtcggaactgaaaaaactgatcaaagaaggcaaagtgaaatacttccttctgtcagaaaacaactcaggcaacagcgaacttgtttcctggattaagaaaaacggaaaagaaataacatctgacgagtacagcggttcctccagcagcacgaacagcgtgcagggaatgcgaggaggacctggcggagaaagccagcaaactctttatctcgtggaataaaaaaaagaggcttggatgaatccaagcctcttttctattaagcttcttcttttacatgtacctttaacacagcctgcacttcaggatgcagcttcacaggcacgttcgtatatcctaatgcacgaatcccgtccggcagttcaagcttccgcttatctactttaatgttatggtctttttggagctgttcagtaatttgcttgcttgtcactgaaccaaataaacggccgccctcacctgattttgcgctaagctcaacagtcagtttttctaatgtctctttcaagctcttagcctgctcaagctcggcaatggcttcttttttctctttctgctgttgtccgtttagcgcgctgatgtttgaagcgttcgcttcaaccgcgaggccttttttaattagaaagttatgcgcataaccgtctgctacgtttttgacttcgcctttttttccttttccttttacatcttgtaagaaaataaccttcatctctgtacgcctccctcaaaatactcatctatggcgtgcttcagccgttccagcgcttcagaaactgaaatgccggacaactgagtcgccgcatttgttaaatgccctccgccttccagggcctccatgatgatctgaacatttacctcgccaagcgaccgcgcactgatacaaaccgtttgttcatcccgtctcgccaccgcaaatgaagcctcaacctcactcatcgacagcagtgaatcagcagcctgcgcaatcagcacttgatcgaagtattcctcttcattttcaggaagagaagcaatcgcaatgttatctttatagaggaccgtatgctggatcagcttcgcccgtttaatataggaatcaacggtttctttcaggaacttctgcaccagcaccgtgtcggcgccttttgcccttaaataagaagccgcatcaaaagtccgcgagcccgtgcggagagaaaagctctttgtatccactattataccagctaatagggctgttgcttcaatcatattgatttttaagcgcttcggctgatattcaagcagctctgtcaccaattccgctgtggaagaagcgtatggttccatataaacgagcagcggatctctgataaactcctcacctctgcggtgatggtcgatgaccacgatatgttcaattttattgaccagccgttcctccataacgagtgacggcttatgtgtatcaacgatcacaagcagtgtgtcatcattggaaatttccattgcttcttcaggcgtaataaatcttgaccacagttcttcatattttttgatttccccaatcaaacgctgcacacttgatccgatttgatttgggtcaatcacgataaaaccatctttgttatttgcctgagccacctttaaaatcccgatcgctgcgccgatagaatccatgtcggggaatttatgccccatgataatcacattgctgctttcggtgacgatttcctttaaggcgtgagaaatcacgcgggcccgcacccttgttcgtttctccattgggtttgttttaccgccgtaaaacttcaccttgccgtttggcagcttaatggctacctggtctccgccgcgtcccagtgctaagtccaagctggattgcgccaaatcgccaagttctttcagggaagagactgaagccccgacaccgacgcttaacgtcagcgctacaccgtcaaacgaggttttttcccgcacttcatcaagaatcgaaaacttcgaattttcgagttcagttaagatgtgttcattaagtacagcgataaagcgttctgaagacgtccttttcaagaagatcccgtactcctgcgcccaagcgttcagcaaagatgtcacctggctgttcatcgtgcttctcgtctggtcatccaatccttgtgtcacatcatcatagttatcaaggaaaatatatgccaggacggttctttcgttttcatatagcttttcaatctgaatttgttctgttacatcaaagaaatataacagacgctcatcccgtttgatgacaaccctaaacttgcggtcattcaatgtaaccgtttccgattccacctcttgtttgataagcggcactaccgattcacaagtatcgtaaagtgatctccccactaaagtgctttcattaaagcaagaggaaagaaacggatttgcccattctatataatattggtcattaaaaagcatgattccaatcggcatttccatcaatgcctcttcaccgacttttttcaacctgtaggacaacgtagaaatataagcatcaatctcttgtcgaataagagaatcagcacgcttaataaaaaacaaaataactgccagcagcagcacttcgacggttcctaatatccagttaaaataaaagctgatgaggattgtaataattgacagagcaatcaatgcatagatgggataccgaaacagcggtttttcataaaagcttggcatttctatcactccccaccatgtgagtaaaactcatgttcacttcaccttattccttatatgaaagcccatatctaaaacgcctaaaatgcgaatggctgccatgaagaccggatgcacaaacccaagtatgacagcaatcacagccgcagcctttggatattgtttcttatggcaatagaaaaagataaatgataaaccttggatgaaaatcagaaacccgagtataaactccccatttaaagcgatagagtacagcatttggcctttttctaaaggcaaaaatgaaagcatgacaataatcaaatacagtactacaacactttgcggaaacttcaactctctaaaaggctttagattaggaatatcgggggagaatcgccttaagagcggcttagcgataaggtaactgaggaaagaaaaaataactcctaccatcacaatagctgttggaaaaagatattgaacgatacccaattgttcttccatcagttttaattgcttctcaaactgtccagcattgcccgactgcttcgctacagtttctaccatatcaagagattgccggtattgtgtcatcgcctcatcaatgatattgatacccaaaaactgaatgcttatcacaaaatagaagacaatactaagcatataaataagagcgcccgaaataatggcgtgcccgggctctttccttttgaaaaaatgtcccatggcaatgccggcgcaagctgacataaaagctacaataagcccgttaaaggacccgacaataaaaacaaccggaagactgacagcgcccatccatatccctagcttcaatccatgtctgatcgtatacaagatcattggcagcggcagtgcaaataacagaattgttccaatcacaggaacataaacgaccagaagcgtgatgatcgcaaacagactgattaaaatagcaccttccattaaagctctcgtttgtttcacttagtcacctcgtatcatcctgaacatacgaatagaaaagagcagcataaacgactgctctttttcatcgctgcaacatacgttgcaccgaatgtttttatatcatctctaaattttacttttatattttaacataagtccaaatcgcaagtaaaatgacgctaatgtttcatgtgaaacataaaaaatgaaaagacattctttgaaaagaatgcccatcacaattaatgtttatcatccataaagccagaagattccttgtttttctttttcgtttttctgacatacataaaaattaagatcaccagtaaaagggttgttgcttgcagaacgccgctgctaaacaagaaaaagttctttatcatgtcccacattgtgtttcacctctttgtgcatgttctcaacccgtatcctatataaggtgaatttccctttttataaacttcaaaacatcatgaacaacattgagcgttgggcatatgctgatatggaatctgatcgataaaggagaattttcacatggatgaacgcagaacattggcttggcatgaaacattagaaatgcacgagctggttgcttttcaatcaaacggactcattaaactgaagaaaatgataagagaagtaaaagaccctcagctcagacagctttataacgtgtctattcagagcgttgagcaaaatttgagagagcttcttccgttctttccacaggctccgcacagagaagatgaggaagaagaacgcgcagataacccattttacagcggtgacctgctcggttttgccaaaacatctgtccgcagctatgccatcgcaattacagaaacagcaacacctcaattaagaaacgtactggtcaaacagctgaatgctgccatccagctgcacgcccaagtttatcgatacatgtatcagcatggatattatccgtcttacaacctttctgaactgttgaaaaacgatgtcagaaacgccaacagagccatttcaatgaaataaaacaagcagcaaaggagttccctttgctgctatttctgctgatccttcactaagccgttcgaacgataagattccagcacgtctctgttggattctccccattctttcatttgcaaaacaatcggttcaagcgttcgcccgaattctgtcagagagtactcaaccttgggcggcacctgttgataaacctcacgatgcacgatgccgtccgcttccagctccctcagctgaagagtaagcattctttgagtaatactcgggcagattcgccgaaactcattaaatcgtttcttgccatctatcatgtgataaaaaagaattcctttccactttccgccaatgacatctagagtaaattcaactggacagccttctttgttcgggtatatattcttttttccactcattcttgaccctccaatagtaccttttttgatactacattacattttgcaactaagctacccagtattttacacaccttttctccttagctcaaagaaaatgcttcttattcacatcaatttttaagggtttgcatgattacacctgcagcaagacgtgttaaactatataaagattacactacttaaaaaaaggataggagctatcatggaaaagatacttattttcggacaccaaaacccagacacagatacgatttgttctgcgattgcttatgctgatttgaaaaacaaactcggcttcaatgctgagcctgtccgtctcggacaagtcaacggcgaaacacaatacgcgcttgactatttcaaacaagaaagcccgcgtcttgttgaaacagctgcaaacgaagtaaacggcgttatcctggttgaccataacgaacgccagcaaagcatcaaagacattgaagaggttcaggttttagaggttatcgaccatcaccgcatcgctaactttgaaacagctgagccgctttactatcgtgctgagcctgtaggctgtacggctaccatcttaaacaaaatgtacaaagagaataacgtgaaaatcgagaaagaaattgccggccttatgctgtctgcgatcatttctgattccctgttatttaaatctccaacttgcacagaccaagacgtagcggcagcaaaagagcttgcggagatcgctggcgtagatgctgaagaatacggcttgaacatgctgaaagcaggcgctgatctaagcaaaaaaacagtggaagagctcatttctcttgatgcgaaagaatttacactcggcagcaagaaagtcgaaatcgcacaagtaaacacagtggacattgaagatgtgaaaaaacgccaagctgaattagaagctgtgatctcaaaagttgtggctgagaagaatcttgatctgttccttctcgttatcacagatatcttagaaaatgattcacttgctcttgcaatcggtaacgaagcagcgaaagtggaaaaagcgttcaacgttactttagaaaacaacacagccctcttaaaaggtgttgtttcccgtaaaaaacaagtcgttcctgtcttaacagacgcaatggctgaataagcaaaaagcatcccgcatcgggatgctttttcttattcacccagcttctcaatttgtcccatcacatcagtaatttgctttgcgttttggaccaggtctgactgctccaattctttaagcgataccttgccttcctcggcttgtttcaacacctcttcagcgcttttctgcaaggtttcgttatgctcctgaatggttcgatgaatctccgctgcggcatcaggcggcgttaattcattaaaatcagcggcatccttctgaatcgattcaagctgcgcttcaagtttttctttcgcctcggtgtcatttacagctttctcagccaattcaggcgcttcctctgcaaatgtcttcaccttctccacataccccgctgcttcactcgtatagttcaatccgtcgttcacctgatcaagcatgccgcatccgcctgcactcaaaagtcccactccggcaagtactgtcaaaatgatcttcatcttcagccccctcatcgtttctttttcattttttcttttaagatcggaatcaatttctctttcgctaacggcagccctttcctcaccaattcacgcttcagccactttttcagcttagacattctgatgctcctctccctttttgataaaaatgaaaaaactccaccaatttggtgaagttcctgaaacaaaaagaccttcaccaaatcagatttggcaaaggtctcgctaacaaatgagattgccagcaaagccgaggacaacttgtcccgtaatgacgactttactgtgaaagctactcccctttggagtgttcatttttattactttcattctaaagcaccgatctgttccagtcaaattcctgccgtttatataaaagcgcgctgtggtatttaaaatttgaatggtttttccatcaggagatcatgctatgacagaggaggttttcatcatgagtcaagagcgcgtgaaacggcctgggcataccagatggtacatatcttcgttacttagcggcattattattcttaattattttgaccgagtggccatctcggtagcggcccctgcgatacaagattcgtttcaccttactgcaactgaactcggcatcgtgttttccatttacacctattcctatacactgatgcagctgcctgtcggaagtttgctggaccgttttggggtcgcatgggtcacgagggttggaatgacaatatggagctttttaacgatccttcttgcttttttgcaaggaaaattgctgttgtatctgttccggtttctcattgggctgacgagcgcctctgcgttccctgctgcctctaaagcaaccgctctctggtttcctccaagtgagcggggattggcaaactcactgttcgattcggccgccaagttttcaaatgtaatcggcgcgccattggtcgcctttcttgtcacaacatttgactggcgtgtcgcttttttgacgattggatgcatcaatgtgctgtttacgatctttttctggcagtattatgaacagcctgaacggcacaaacgtatttctaaaagtgaactaaactatattcaaaaacacaatgccattacaacagagcaaatcccttacaaaacgggcccgcttttaaaaaagcttttcaccaatcggaaagtatggggcttaatgatcggatttacagggtacgggtatacattcaacctgctgctcacctggcttccgactttctttaaacatacatacggtatggatctcatgtcgtccggtttatttacggcagtgccgtggctgatctcaaccatttccggaattgccgtcggcggctggctcgtcgattattttattaagaaaggctatcctaacaccaaggtgtaccgaaccgtaatcatagtcggaatgagctttggctttttctttttaggctccattctgacgaacaatattaccgtagccattatttgcatttccatcggactcgccggaatttcagcaaccgctccggtcggctggtccatctccgcagaactcgcgccgatcggttccgtatccatgctgagctccatggtgaatctcgcaaacaacctgttcggaggcattattgctgcgtcactgacagggtatttgtttgatgtgacaggctcctttacactcagctttctggtagctggttttgtgctgttgctgggattggttttttatgtgtttgtattaggggatgtaaaacgaattaaactggaatgaagagtgcttgctgaaaagcactcttttctttgaatccgccaggtgttattttctttctcccaacattcactaggctgtcttcggacgaaaacaccaccattttatccttgactccaaccaaaggtaaggcctcatagtgaaagaagaaaggaggagtcagatggtgaaattaacagtaaaagaactatccaatattgcgaatgtcacaatcaaaacgctttatcattaccacaaaatcggcttgctagccccaaaggaaataagcgaagccggatatcggtactatggtgctgaagaactaaaaagactgcaggaaatccttttttacaaagaattagatattcctttgtcagaaatcaaaacattactaaaagaggatgctgaaagaacaagtacattagaaaaacaaaaaaagctgtttgaaaagaaaattgaaaagtatcagcgtctcattcaaacagtcaacacatctttagaatacacgagaaaaggcgaaaacatggatcataaggtaatgtttaaaggatttgaaagcgctgaagaatggaaacaatctttagcagaacaaaatgggtatttaaaagagcgttacgattttgaattggatacacatacaatcaatgtcgatgaaatgaacaaaatggcaatagaggctaaacattttcttgataggatggctgattttttaagaaacggtgtaacgtatcatgacccttccgtgcaagagcatgtcatgaatcatcttaagttcctaaatcagaacgggcatccgacaagtaaagaagattacgtaaaacaaacacgtttttttatgcaagatgatttccatagaggaatgttagaagagcagcaaaccggtttatcttattatttggttgtcgttgcagaacacctgtagtgttttgtcaccctttatagggtgacagccatcaggattacgagacagcaccgccaacaatcgaaacattctgccggtcaacggcaaaacgccgtccgttccattttaatacggtttgaacatatcccaatgagtcggcgttataccttcccgctatccgctggtacgccaataattcgtatacgccgtctctgtcaaaatcaaccggatacaaacccgataaaggattcacccatccttctatcggcatttttaacacaccttggctgttataaatctcattcaaatattccctgcctttgtaagtaaggtcgaggatatacgtttcgttttgctgatgactgatgacgctcgctttatattgattttgatacctcacactgtactttaattcatcattcaatacatctgaattgaaaattcgccggaactgcctgtttagataggcaaacacgtatgcataaatagcaccgccgcttccccctgtatctattaccaccgccacatcctcaatcttgtcgcctgtcatatcccccagaaaaagtgacggattgtatcccatattgttttgaagctgaatctgctgctcctgatgggttctgccatcacagatcaccaatgtgatatttctccataacaggctgccgggcatttgatttccagttagaaagacctcatcaataacgccgtctcccgttacatcgccgcgagtagatgcaatgattgcacgtgaggagacaggctgccgaaatacgtatggatgttgaacaagtcctctgctttcataaaaccaataaggagccattctgatgtcatacacattcaattgtgtcaccttccctaatcagctgaatgaatcattatatgcaggaatggcacatcaaagacatatcttacacaccaattaaatccgtaccataagagttatcgattacacaaagccactcgccttgcgcattcttcttaaatacataggtcgcccttctttccatcgcatactcggagtcctttttatccgaatcaagcagtgtctgagaaaggacgagtaccgtgtcacctgcttctaacaggatcatttccccttgtttcgggacaatatgatgattgaaatagttcacaatcgtaataaacgcttttttgatttcttctttgcctcgcgcgatcatgcccggcttcacgactaaaacggcatcttccgaataataattcatcagtgtatcaaaatcttcattttggattgccaaatcacacgcagagatgatgtctttcaattgctgttccaaatgaattcccccaatcatcatgattggatatattatacatcgctagaccactgaaaccttgaaaacaaaatgaaaagtatccttttttcctatataatcaaatagatatatttaacaaagtacccaagtgaaggggtgaacattattgtctgcggaagtaacgttacatgacaatatacattatgatttaagtgcggattgccagcactgttttggcctgtgctgtgtcgccttgccttatgcgaagtcggcagattttgcttttgataaagacgggggcacgccttgccgcaacttacaatcaaactatcaatgttctatacataaagatctcagagaaaaaggatttcgaggctgctctgcatatgaatgctttggcgccggccaaaaagtatcccaaatcacttatgagggaaaggattggcgaaacagccccgaaacggccaaccagatgtttgacgtttttcctatcatgcagcagctgcacgaaatgctctggtatttacatgaagctctttctatagatatagccaagccgattcatcctgaactgagaaccagtttcgaaaaaatagaaaggctcaccaggctcagcaaagaacgcttgctgacactgcaggtggacgagcatcgagctgaggtcaatgaatggctgttaaaaacgagtgaactggtgcgtgcccaagcccgccatccaaaactcccgaaaaaggtcagccggggaagtgtcctgatcggcgcgaaactgaaagggcttgatctgcgaggagcaaatctaagaggggcgctgctcatagccgccgatctgagatttgccgatttgagaatgacagactttatcggtgcagatatgagagacgctgatctcagcggcgccgacctgaccgggagcatctttctgacacaggcacaggtgaacgccgccaacggcgattcgaaaacaaagctgccgctgtctgtacgaacccctgcccattggaaataaaaaaggacccgctaacggtccttttttactgatcaattcaatcctttttcgttccttttatccggcattttcacacttcttgccaagtatcccgacagccataacgcaaccagcagcatgaaggtgatcataccgacgacgcccagccagtgaaaagcagaccagaatagccctccgactgttccgcaaacacttgaaccggcgtaataaaagaacaaatacagcgatgaagcctgtgctttgttatgaagggctctcctgcccacccaactgctggcaactgaatgtccgccgaaaaaaccgaatgtaaagagggcaatccccagaattttcactgccagcatactgtttatcgtgaataaagcacctgcaatgacgatgaaaatattcatcaccagtatttttggatagccatatcgatcaaccattcttccaatgaaagacgagctgaaaatgcctacaatcatcacaataaatatccagctggcaaatgctttattaagcgaatacggcgggcccaacagcacatacacaatgtaattaaacaaggcaacattgcttccgagcagcaaaaaaccaatgagaaacaaactgaatagttttcggtccttcaagtggccaatcagagacattcccaatttcccgagcttcaattttcttggcgtaaaatgcctggatggcggcaaatttataaaaaatataacactagcaatcaaactaatgacaccaattgatcccatcgccatatgccaattcaagtactcgctcaggagcccggaaacgatccttccgaaaacggcgccgattgcatttccgctgatatacagccccatcgccgacccaagacttccgggttcaatttcttccccgagataagccatcgcaatcgacggaaggcctgcgagcgcaacgccttgaatggttctcaatacgagcagcgtatgaaagtttggactaaaggccgatgccagacagagaaccgatgcggccagcatggaaatacccataatcggcttgcgcccccacacctcggataatgaaccaaagacaagcatgctcacagctaacagcattgtggtaacagataaagaaagactcgccgcagtaggcgttacatgaaattcccgcgtgaattcctccatgagcggctgtacgcaatatagaatcgcaaatgtattgaaacccgcagcgaagaaagcaaacgtaatttttcgaaaaaccggtgtgcctttttgaatgtatgtcatcgggactttatcggtccctcatcatgttgtggagcactgccattcataaacaaccatcctttatttcttccgaattcaaacatcctcgagtctgtttatattactatcttagcaccgttgatatatgttgtataatgcatataaaatatcattttcatgcttatatgtaataaaggagggatgataattggaatgggaacaacttgaatattttcaaacactggcccggatgcagcacgtcacgaaagccgcaaaaagcctctccatcacacagcctgcgctttcacgctctatcgccaggctggaaaatcatttgggcgtcccgctatttgacaggcaaggacgatccatcagcttaaatcaatacggacacatttttttgcggcgggttcaggcgatgatgaaggagtacaccgaaggaaaagaagaaatccaagccttattaaagccagaccaaggcgtagtctctctcggttttttacatacattaggcaccacgctcgtgcccgatctcatcggctcctttcagcaggaataccccaacattgccttccagctgaagcaaaaccactcttattggctgcttgaacgattaaaatccggagatctggacctctgtctcctcgcttcgattaagcctgaaaatccgatccaatggatcaagctgtggagtgaagaactctttgtatttgtgccaaatgatcatccattagccagtcgcgaaagcattaccctgaatgagattgccggggagcgttttattttattgaaaaagggctatgcgcttcggatgacggtcgatgagctgtttgagaaggccgatatacagccgaacattatgtttgaaggagaagaagcagctactgccgcaggttttgtggcagccggactgggcatatctattctcccagacctgaaaggcttagaccaaagcaaaatcaccaaaatccgcgtcagctggccggaatgtcagcgtgtcataggaattgcctggataaaaggcaggtttttatcaccggttgctgagacctttaaacaatatgtgatcagccatttttctgagtagggaggattcaaacatgaatgtcaaaaaaatcacgtcagaacaggatttacatacagcgtttgaaatcagaaaggcagtatttgtagaggaacaaggctgtcccatttcggatgaattcgatgagttcgatacactccacggtgactgccagcacatcctagcttatcatcagaatgtacctgttggcactgcacgtgtccgtatcgttggccacgcggggaaactggaacgaatctgcattctgaagtcttaccgcaaattcggtttgggaaaagtgatcgtcgatgcattagaacgtattgtgaaagaacaaggcatttctgccttcaaactgcacggccagacacaggcggcaggcttttatgaaaagctcggctatcagactgcatcagaagaatttatgctggacggcattccgcatgtactgatgacaaaacaagacgattctgctttatagattgttcacaaatttgtcacttatgagcatgaacagttcattggtatactaatcaccgattatggagagaaggaatgattgtatgccagcaaataaaaaagagggtcttatatttggcgtgatgatgtgttttggaatggtctgcgtcatgtcgatttacaatgccatcatcaacggagccattcaggatttttcactggtgaccgtttttgaaatggccatcggttttatggtcgccctcctgttcgatttactgttagtgggccccctcgccaagaagattgcattccgcatgccgttcgacaagactaaaaaaatttatgtcatccttgccatgtcaacttgtatggtgattggcatggtactttgtatgtctgtgttcggtttagtgacagcggttctggcaaatgggctgaacggggacagcctcttcagtgcttaccttatgatggtgttgaaaaatttcatcctggcctatccattgcaattactgattatgggcccattagtcagagggattttcatgaaatttgtaaaaccaaagctcaaaactgcaatttaaatagaaaaggagtgagcctgacactcactccttttgctcatgaatcgaatgtaaaacaagctccgcaaaagcctctgcggcaggcagctgccattttttctttttgagtaaatcggatcaaggactgcaccatgctgaagaactttcagcttatgtttttcacttccattaatccctataccttaccaaatagtttttatacaattcttcgttataaagaatttcttcgccatgtgaagagcaaatgagcgttggtttgatttgatctatgattgagccgctatcgatgttctcatttatatcaacactgaatcttcttataggtgggtgtaaatcctccttacttgtgataaaaaggtcgcccgttaatagcgtacgatcgattttatgatcatacacgacatgccccggcgaatggccaggtgttaaatagtatttcagaggcaggtgagcaagcgtttgctccgtcagcggctggacaatatgggctacccctgtgttctccacttcatttttgttcggatatggctcttccccattgatgtattttagttctttctggtgcgcaaaaatcggaatatcaaatctcactaaccattttgatgcacctccgatatgatcactgtggccatgggtaagcaaaatggcttttggattgccgatcgctaacgctgccctaatttgagcatcagcaaaacgttctattcccgtatcaacaatatatacatcatcaccatctttgataaaccaggtatgaaccggaatccgaagaggcacatcaagctcaaattcacattgatagacatgctctgataattgtctcaagttcacgcaaaccactccctttggagatttttgatagtttaaaagaaaaatagaagtgaacggactattttcaaggcagattatcttgaaaatggtcccacactccagcggaccggtattcttgaggaggagacgccgattttcgccagcatcagctcgacttgttaacattgtccattaataatccctcttgttccccttcttcacatactcccaatcacgttctatattcttcctcactctatgaaggagtgcagaaatggtttccttttcctctgaagtaaaaccggacaaggccacttccgtggaatgttctccttctcttcttaacaatggatatacctttttccctttctcagtcgggaacagtttttttatttttttattttgctcatctggcagtttttgaataaatccctgcatttccagcttcttaatggcccgcgcggccgttgtccggtccacctttatcatttccgccaatttttcttgaataattcctggattctcgtatatacgtacgagatagaggtactgccctcttgttaagtccaaatctttaaattcgatgttgcttatggaatccaacgctcttgctatcatgccgatctcacgcaaaatatcattcattcctaaaacccctcacgtatttttgttgcaattacaacaaaaatgttttaaccttactattataagaccacatgcgtgctgtacagtccagactaatatcagaaaaggattgattcataatgaatataaaaagaataacaactgaagctgatttacatgaagctttgaatattagaaagacggttttcattgaggagcaacatgtatcggaatccgaagagttcgatgaatttgatacgctccaggaacaatgccagcatgtcttggtatatcatgagaatcagcctgtcggcacgggccgtgtgcgcatcgttgaccatacagcaaagctggaaagaatctgcatcctaaaaccttaccgtaagtatggattgggaaaagtcatcgtaagcgggttagaagaaatcataaaagaaaaaggactgactgcatgtaagctgcatggtcaaacacaagcagcaggcttttatcaaaaactgggctaccagatttcttcacaggaatttatggaagacggcatccctcacgtcctgatgacaaaagacatatcgcggatttaacatgaaatatattttttacggattaggaatacttatattaagtttgggcatttccttaaccatacaatcaggactgggcacatcacccttcgatgcccttttggtgggtctgtcaaaagaaatcggtcttaccgtaggaagctgggaggtccttatttctgtgatcctcttaatctgcaacgctatattaacgagaaaaaaacctattttgctgggcttgattacagcattcattactggaataggcattgacctatggttgtttgttgtaaaaaacaccctctatctaaacgcgttgttaagcaaactgatttgtttcggaattggtttggtgctcatcggtcttggaacagccatctatcttcagacgaaattcgcatcaacgcccatcgatcatttaacacttattatccgagatctctccaaaagaacaatcttgttttcaagaacattggtatacgctcttttcttagtattagccatcatctttaaaggccctatcggcatcggaaccctattaaccgtctgtttgggaggaatgatccttcacgtttttatgcctattgtggaaaaacaattcttatcaaaaaaaagaaggggttaaaaaacctcttctttgaaaaaacgaaacgcaaaacaagctacgtttcgttcaataattttatgataaattaaaatttatagtaccaaaaaatcgcaatttcatttgctgttggaaggttggaataaagcatcgtatcaactgcacctattataaagtgatgtttggcataaaaacgacaagctgaaacattaatatcttgtgtttcaagcataagaccaaaaaagcgattctcctttgcccactcaatcgctttatgtaataatgctgttccaacgcctttttgtctatagtcttttgcaacggcaatgtcctctattagtgcatacccattccagttagaacgaatcttaatccggccgatgcagttgttttcaacataatataaaaaaaccgcttttccctcttcttcaacataactaacatccatttcatcatcttcatattgtttaaaataaggtttagaaaatcgttcctcagtatatgtccaaacaccgttttcaaaagcaggtatcattctcccaaaaacaacgaaaggttcatttggtttattgaaatctttcaaattcatttgagtcattttcttgatcatatcaatcccctcctaaacgagattatattagcatactcgtttcgatcgataacagcttccaaaagggcactctttaaaagaacagcatccattaccttttatataagcgatttttctatttcactgtcttaatggggtatttcaacagaggcttgtggtacagtaaaaaggaatagaaacaagagaaaagaagatgaacctatgcccactaacaataaactcaatgagaaatatcatacttccttcaactcgcccacaaccctgttgactagtatccgtggagagaggaagctttgacacagcttctgccattgatgacatctctattgaagtatccaaaggacaaccaaggatcgctatttgactttttcaagaagaaagtagagtgaataaaggagtgattgagtatgttaacaagagaagatatctttaaacacgtcaaagaaaaatacggtacatcgcctgattacccgtgggagaaatacccaaactatgcttctttgagacatacatcaaacaaaaaatggtacggtcttatcatgaatgttctcccagaaaaattaggcttggatggtcatggcgaaatagatattctaaatctaaaatgtccccctgacataagtgatagcttaagaaacggggaaaatatcttacccggatatcatatggataaggaacattggatttcaattgttttagaacggacagatccagaaggcgaaatctataacttaatcgagcagagctttcatttaaccaagtgaagataaagagtgttccggctaatcaagctgcgaagagtagtgggcactttcattttaggatactgttcttcactcagtccataaacgcaacttagtctatctggtgcgagagtgggagaagaatttctaccaacttcttatggaaaaggatgaatagttatgacaaataacttaaaacagagaagaatcattttagatttagcagttactttagatggttttattgaagggaaaaatggagaagttgattggtgcattatggaccctgatatggggtttactgatttcttaaatcaaattgatactattttatatggcagaaaaagctacgatttatggggacaatatattccaaaagatgaagaccctgatacagaaaaggaaatttgggaattggttcatagtaaaaagaaatatgttttttccagaacacaaaatgagattgataatcaagccatatttataaatgataatattcttgaagaaggaaataaattgaagaaaaagtctggcaaagacatctggctatatggtggagcgagtctcattacaacttttataaatttggggcttgttgatgaatttagattatctattcaccctgttgttttgggagaaggaaaaccgttgtttattgatgtaaaacagaggataaatttaaaaatggtgaatacaagaacattttcctctggcgttgtgcaaatcgtttatcattggaatggctaacattgtaaagtaacactcgacagtaatccttcttattgaactaaaggggaatccataaataatgggttccccttaatatactatggaactatcaatatcaaattttctgtaataaaagaggattgaaaaggacggtgtctcctccattaacatcattaagcattatagtatattttcttctccctcttttaagtaaatcggctaagttttgtgtttataaaaaaacgaaagaaggtgatcctatgcccaataacaataaatccaatagattaatcgctgagaagtctacttattttacttcaacatgctcataaccctgtggactggttcccttggggagaagaagcatatgaaaaagcgaaacgcgaaaacaagcctgttctcgtatctattgggtatagctaacgatggctaatctaaagaacatgctattgatgccatgtttattcattttacaaaaaaggatcaaccttgaattactttcacaagattgatcctttcactcatttagccatgtctccgcgaacgtttatatacattcaagattactagccaacaaataacaatgattcctgcaaaaagtatgagcatattgctatacaaataggtagagtgatcaacgtcaataggcagcagcctatgatctaggaagccgatagataataaaccgcctacaatcgcaatacccgttccctctgataaaaagctcgtgaaattaagcaaactcattccagcgcccgcttccttttctttcaaactgctagacacaactgtagatataactgtttttgtgaaagatagccccccaaaaacaaaaattactataattgtcatgatccatggtgctgcatctataaaaaaggcagcgattaaaaagccggaagaaagcaatgcacttccaatagttagtacatacaaggaacctttccgatcaacaagcaatcccccaatgtaaccaaagatgatgacactcattgttccggggaaaataatgccgcttccaattgctgcagtacttaaatggtgaacatctttcatcatgtaaggaaccatagagacaaatcctgctactgtaccaaatattagtcctccgcaaagggttccaatcacaaaaaagacgtttttccctaattcagggtcaacaaaagggtcctgagctttcctaatgtgttgcacaaatatgaagaaagcaaggatactgatgatcagaaaagaaaatctataagatgttgtaaacagcataaaaaatacgatacctgcagacatcaatataatccctgccatatcaatgtgtcctcttattctctcttcctttttcaacaattttataaggaatggaacggtgataattgttgcagttggaataagcagcaaatacgaccaatggatataatgagcaaccattccgccaatagctggcccaacaccttctcccattgctaccagggacccgatcaggccaaatgctttccccctgttctcttttggaatatagcgcgcaacgacaaccatcacaagagctgggaatgcggctgcaccaattccttgaataaatcgggctagaatgagaataggaaagaaagagtgtccaacaaatccaatgatcgaccctaagccatttaccataatcccaaatagaagcagatttttgatgcccagctggtctgatagctttccatatagagctgttccaatggagaaggttaacataaaggctgtattcacccagtttgcacttgctggcagtttattaaactcgttggcaatatcaggtaatgagacgttcagaaccatttcatttaatacgctgaaaaatgatagaacacaaagccaaatcaaaacttgattgtgccgtaaagttgactgtgaataagacgtattcacaatttcccctccattaatgagggcagacgcagtttatagggtcattgatacgcttccctcttttaattgtaccctgttcattttattgcacttcataataactccccctacatttgattgatatgatcttattatatatagactaaggattaaacttttactttttttataaaaatttgaccagattgcgaaacaaggaaaaacgttattcgcatttatctcaagtggcaaaatgaaacattagtttatattttcacatcacaattatcgataagcagtcagttattgtatttgtttaggataactgtggtaacctgaatataaccaacttaggaagaaggtgatcccatgccaaataaaagtaaacccaatagattaatcgctgaaaagtctccttatttactccaacacgcccacaaccctgtggactggttcccgtggggagaagaagcatttgcaaaagcaaaacgcgaaaacaagccggttctggtcagcatcggttattcgacgacttgtcattggtggcctaggataatcaaatcgtgtggaactccattaaaagataacagaagccattttaaacgataatactatttgttcaaacaatacagtctaccttttatttcattcattttctaaaacctgtaatccgtaaccacgcggtagcaggtttttttatttgcttgacttagagttaactctaaattgtaaactaactttaattaaatgagagggatgatgttgttgtattccattagtaaagctgctgagaagactagtattagttcgtatacattaagatattacgaaaagattgggttacttccaccaccaaaacgaaaaaacagtggaaggcgtttttatacggagactgatattcagttcatgttattcctgaaaagtttaaaggaaacaggtatgtctttggaggatattaatgagtttgtcaaagacggatgcattttggaaaaaatcaattcggatgttaaatcggcacaactctccccatctataaataaacgtattgagattttaaccaagcacttagagaaaatggaaattaaaaaaagggagctggaagaagtgatttctactacaaaaggaaaactggatacatatttttcaattttgaaagaggaagtggaaaacaaatgaaacatttaaatatatacataatgttacttggcttctctattttcacgggagctacttttaatcttgcaaaatatacagttggatatttttctccatcgtcttctgcggcatggcgtttcggtttagcggctgcagtgatgctcatcattttgatttttactgaaggtataaagaagagtcaattacggaaaaacgccgtttcatacattattcttggaattataggaatctttggatttaatgccttgttttttgttggtttaaaatatacatctcccgttaacggagcattaataatggggctgaatcctttattaacagcaattctcgctcgaattatcttaaaggacaacatgacaaaaaaacaagtactcggcatattctttgcattcatcggtgtattgttagtcattacacaaggttctatcgaaaccattaaaaccttatcaatttcaggaggagacttaataatctttacaggtaacgtttgttgggcactttatggcgtacttggacgtcggtttgtaaaggatggtacaccgctatctacaaccacttatacgatggttattggtgctgttagtttaatagtagtttccttatttacatccaaacctgtttctttatcgaacatcccgattggagtttggggggcaattgcttttatggctttctttacaagtgttttgggttacctatggtggaatcaggggattaaagagattggggctagtaaaacatctttatttttcaaccttgttcccgttgtaacgatgattatttcatttgccgttggaacaccaataaaggtatttcaagttattggggctgtgctagttatattaggcgttttaaccgcttcgggggtaatacgtattcctaagtacaatactaaagaacagtcagctatataaagaaatagggagtatttttgagaaaatgtgttaagttaaatatacactaattataggaagaaggtgatcccatgccaaacaaaagtaaacccaatagattaatcaatgagaaatcaccatatttactccaacacgcccacaaccctgtggactggttcccgtggggagaagaagcttttgaaaaagcaaaacgcgaaaacaagccggttctggtcagcatcggttattcgacttgtcattggtgccacgttatggctcacgaaagctttgaagacgaagaaatcgcgcgtcttctcaatgaacggtttgtggcgattaaagtcgaccgggaagagcggccggatgtggattctgtttatatgagaatctgccagctgatgaccgggcagggcggctggccgctgaatgtgtttatcacgcctgatcagaagccgttttacgcgggtacatattttccaaagacgagcaaattcaatcgtcccggttttgttgatgtgcttgagcatctgtctgagacgtttgcgaacgaccgtgagcatgtcgaggatattgcggagaacgccgctaaacatttgcagaccaaaacagccgccaaatcaggcgaaggccttagcgagtcagcgatttcccggacattccagcagcttgccagcgggtttgatacgatctacggcggtttcgggcaggcaccgaaatttccgatgccccatatgctgatgtatttgcttcgttatcatcacaatacggggcaggataacgctttatacaacgtgacgaaaacgctggacagcatggcgaatggcggcatttacgatcatatcggctatgggttcgcccgctattcgaccgatgacgagtggctcgttccccactttgaaaaaatgctgtacgacaatgcgctgctgctgactgcttatacagaagcctatcaggtcacgcaaaacagccgctataaagagatttgtgaacagatcattacgttcattcagagggaaatgactcatgaagacggaagctttttctctgctttagacgcggatacagaaggagaagaaggaaagtactacgtgtggtcaaaggaagaaattctgaaaacgctcggggacgatctcggaacgctgtattgccaagtgtatgacatcactgaagaaggaaactttgaaggcaaaaatattcctaacctcattcacacaaagtgggaacaaatcaaagccgatgccgggttaaccgaaaaagagctcagtctcaaactcgaagacgcaagacagcagctcttgaagacacgcgaggaaagaacctatccgcatgtcgatgataaagtgctcacctcatggaacgcgctgatgatcgcgggtcttgcgaaagcggcaaaggtataccaggagccgaaatatctcagcctagcgaaagacgccatcacatttattgaaaacaaattaatcatcgacggccgtgtgatggtccgatatcgtgatggcgaagtgaaaaacaaaggctttatcgacgattacgcttttctcctatgggcttatctggatctctatgaagcttcgtttgatctatcttttttacaaaaagcgaagaaactgacagacgatatgatcagcttattttgggatgaggagcatggcggattctacttcaccggacacgatgctgaggccttaatcgtccgggaaaaagaagtgtacgacggcgccgtgccttcaggaaacagtgtggcagctgttcagctgctgcgtcttggacaagtcacaggcgacttatcactgatcgaaaaagcggaaacaatgttttccgtgttcaagccagacatcgacgcgtatccgagcggccatgctttctttatgcaaagtgtgttaaggcatctgatgcctaaaaaagaaatcgtgatttttggaagtgcagacgatccagccagaaaacaaatcataacggagcttcaaaaagcctttaagcctaacgactccattctggtggcagagcagcccgagcaatgcaaagacattgcgccatttgcagcagactaccgcatcatagacggcaaaacaaccgtgtatatttgtgaaaacttcgcctgccagcagccgacaacgaatatcgaagaagccatccaaacgttaataagcagcagggattaagacccttgctgcttactttttgatttcttatggtaccataaagcgatccccgcaaacacaagattgaccgctatcgtaaagaaagcctcccacatcgggttcccccgcgtaaccgtaaagagagaaggaattcctccatacacactgtttttttctgtaataaacatacacaaaaacatattattcgcggcatgggcgccaagtgatatttcgatgcttccagttttaatcgtgtaataggtccacacaaaaccaaatgttaaatactcaattcctgcccagacagcgccattgttcatttctggattcgcaaaatgcaatacgccaaacaatcctccgacaatcagtgtcaaaaatagaggatttttcgtcaatctcccgaaagcttgaagcaaaaatcccctgaaaaacagttcctcagctgatgtctgaatcggaaccaaaatgagggcagccgctagcagccagataaagcgtgaggcattaaactcttgcattgaatagctatcaggatgaatcgcaaaatcaatcaattgtacggcgatcatcagcaagaaataagcaataaagccaaaggaaattctccgccaattcatctttgaatttggtgtaatcacagttcggaaaggccgcttcaaaataaagcgcacagccagccaaactcccggaatggcgaataaataaatcacatgggacaaataaagatctacgaggggatcactcagcacagcttcatccaaatcaaacgtgatattgggattcacaataaccgtgaacagtatagcgaaaaggtaagctatattcccgaatacatataaccctaccatcaccaaaaaagcgaaaaaatatctccacaacgtattgtttccttctataggacggataaatgaattcattccttctatgtctcttcctttcaatgagaatattactatatatttgcataaattggtctatgaatctactgttttggaaatcttttaagcaaaattaaaatataaagtgtgaatttagttcttccatctagtgatttgaactctgttgccaatgaaccaagatacttataatagtcctaagaggggaattttcagtcttttcttactactcaaaagggggttttttatgaatacgatcttcaaacaaaagaatacacatcctttctcaaacgcagcgaatcgtttagaccgccttccgatttcacgcgttcatttccaagtgttaaccgctctcggcattgtttatttctttgatctcgcagatttatttaccctcagcaatgtagcgccggcactgatcgagcattggggcatcccgctttcaactattgctaacgtaacggctgcttcgtttttaggcatgtttttaggcgcttcactgggcggacggctgtccgatcgaatcggccgcaaaaaagccttaaatctatttgtctttgttttttcaatcgcatcgctatgcaatgctgcggcatgggacattccatctttaatgacattccgttttctcaccggatttggcgttgcagccgccatggtcattacgaatagctatttggcggaatttttcccttcaagtgtacgtggaaaatatatttctttttgtgccatgattggattgatcggggttccgatcaccaacattgtgtctgcctttgtcattcctcttggttcatggggatggaggctagtatttgtatggggtgccgtcggccttatttattttttctttattcgacggctggaagagtcgcctcgctggcacgaaaatcgcggggaatatgcgaaagccgatgcgatcctcaaccgaattgaggcacaggttgaaaaggagaaaggcccgcttccggcagcatcccagcctaaagtaagcgaaactgttaagcagcatgcaggttacgccggcttattgaaaggcagaaacctcaaaatcaccatcgtattatctgctgtatggatttttgaaacgtttgggttttacggatttgcctcatgggttccaagcctgttaaaaagcaatggtgtcaccatggaaaatacattgtggtataacgtattgcattccgtcggcgctccgcttggcgcactgctcggctccatgatttctgaaagatttcaaagaaaatggattttagctgcgagtgcgtttctgacggccatcgccgggctcttatatggtatgacttttattcccatcatgatcattgtctttggttttatcgtgaatatcacagaacgggtctttacctcgaacttatacgcctatacatctgaaccttatccgactgaataccgctcgtctggcagcggtttagcctatggtcttggccgtttttcaaacatttttggctcattgcttgtcggatttattgccgttcagctcggctatatcagcgtcttcttatttattgggggctgctggctcgcatgctccttgctgttaatcttcttcggtcctaatacgaatgcgaaacagatttaaaaaagtcagtgcggatctgccgcactgatctcattacaattgcttcaaaatcctcgcggggtttccgcctacaacagtattagcgggtacatccttagtgacaacagatccagaagcaatcactgcgttatcaccgattgtcactcccgggttaatcaccgcccggcctccaatccaaacttgatctccaattgtcacaggcttaccgaactccttcccggatttcctttcgatcggatcaagaggatgaccggccgtgtagatatgtacacctggcgcaatcaaacaatgacggccgatacgcacctcacacacatctaaaatgacacagtcaaaattaacaaatgtatgatctccgatatgaatgtgatagccataatcacagcggaatgtcggcaaaatcgtgacttgatccccaaccgaaccgagcagctccttcaaaagctctgtccgcactatatcatcttccggtgtttcgttatattgtctaatcagctgtctcgcatgcttgcgttctagtaatagttgttgatcttccgaattgtataattctccggctgccattttttctttttctgtcctcagcatttaagtcactccatgtcagattgtaatctcgatcaaatttccttcatcatcctcaatcacactttcatagtagccgtctcctgttgtccgcgggccgttgacgacggcaaaaccatccgccttcaaccgagcagtcagttcatccactttctcccggctcccaacggaaaaggcaatatgtgcccagcctgtcattgtttgtgagggcggatcggtcacatttccttttttcataatctccagccttgctccggaaccaaacgtaataaaataagacttaaaatcttttttctcattatgatacaaatcattcgcttcgccattaaaatacgattcataaaaagacttcattcgctctaaatcattgacccagaccgctgtatgttcaatctgcatttcttcctcctccttcgccttcaatgaagttataaggtatgaaatgcatttcagttcaagcttttttcttaaatttatgctgaattttgatatcagcgggttcatcctgcaaaaatagagaaaatgctgcgatgccgagctgctcaagattcaaatcaagcgacggaaaaccaagaacacggctgatagaagtatttccctcgcctatgatttcaacatcccaattactctttttggcaaatagatgaattccagctgccacttcatcactatttgcataaatagcagtcggaaccctcccgctcatataaaaatgttcagctgcccgctcaccatcattcatatcgttgcatccggacagcatatggcggtcttccaaccttccgcagacagctttataggccgcagctttatcagccgtgctcgggctcctatcagcttctctgacacacgtaaaagcaatattctcatgcccgcggccctttaaatagcgaaagctctctgcataagcagcttttctgtcattaaaagcacaaggaacatcaatgtctccggtatcctcacaagcgatgatcggcccatattcctgataagctaaaatgctgtcccaatgattggcgcgggaagtaatgatgagaccgtctattttcttcgttcttaacagctctaaatatttgatttcaatatcggggttataattggtggggagaagggtcgttgcatactcatactgaaaagccgccttggtgattccgttaacgattttatcaaagcagggatgatcgctataaggcagaatcacaccgaccgtatgggttttcccgcgaatgagatcgattgcggttcgatttggcgtataatccaattccttcatgacttgatgaacaagctttctcttttcttcagatacataaggatggtgattcaatacacgcgagacagtcgaaacagatacatttgccagtcttgcgatctcttttatatttgccatctctttctccttttcatataaaaaaagcagtaagtgtaaaatccttactgctatctcatcatatattgatgataagttcaacaggacaatggtcggaacccatgacgtccgctgatatgcaggcatcttcaatctgttccttaagtctttcagaaacaacaaaataatcaatccgccatccgatatttctgtcccgggcgccggcacgatacgaccaccaggaataagcgccttcaagatcaggataaacatgacggaaagaatcaacaaagccagcttctaagaaacgagtgaatgcccctctttcttgatctgaaaatccagcgttattccggttcacctttggatttttcaaatcaatctcctgatgggctacattcaaatcaccgcataaaatcactggttttttctgatccaattcaagaatataagacaataaagcctcttcccattgcatgcggtaatcaatccgctctaatccccttctggaattgggcgtataaacagtcatcacatacacgttttcaaattccagcgtaatcactctgccttcttggtcatgctcttctactccgataccgtagatgacctgcagcggttcttgcttagaaaaaacagctgtgccggaatatccttttttcactgcataattccagtacacatgatagccttcaggctggagatcaacctggccgtcctgtatcttcgtttcctgaagacatataatatctgcatcctcttctttcaaataagagaggaaatccatttttctcatcacagcccgcaggccgtttacattccatgaaatcaacttcatgtttcatcctcccccctataaaaaagagcaagaacccgaaggtccttgctctttacgcatcagcttactcaccgcttacgtatggaagtaaagccatttgacgtgcgcgtttgatcgctgcagtcaatttacgttggtatttagcgtttgttccagttacacgacgtggtaaaattttaccgcgctcagaaacaaactttttaagaagatctacatctttgtagtcgatgtgcgtgataccgttagaagtgaaataacacactttacggcgtttcgcacgaccgcctctgcgtcctcctgccattgtcatttccctcctttctttttcattttaggcgataatcacattagaatggaagatcatcatccgagatgtcaatcggtttgccgtcgttggcaaatgggtcatcattaaagctgttcccctgattgcgtctctggttgttttgatttcccccaaatggattatcattttggcctccgccaaagtactggcctccgccgctgtttccttcgttgtatccacctgaaccagaaccgccgccgtttttcggctcaagaaattgaacactttcagcttggacctctgtcacgaagacacgctgtccttgctggttttcatagtttcttgtttgtaaacggccatctacgcctgcaaggcttccttttttcaagaagtttgcaacgttttcggcttgtcttctccaagtgacacaattaatgaaatcggcctcacgttctccggactggttcgtaaatgtacgattcacagcaagagtaaacgtagcaacagccgcaccgtttggcgtataacgaagctctgggtcttttgtcagtcttccgactaatacaactcggttaagcataagaaagaccaccttttaccattatatatttcaaaattgcttattcttcttctttaacaacaatgtggcgaatgatatcgtcactgatcttagctagacggtcaaattcttgaactgccgcagcgtcagattgaacgtttacgatttggtagaaaccgtcgcggaaatcgttgatttcgtaagcaagacgacgtttaccccaatcctttgttccagtgatctccgcaccgttagaagtcagaacgttgttgaaacgctcgataactgcttttttagactcttcgtcaatgtttgggcggataatgtacataacttcgtactttctcatctgtttgcacctccttttggactaagcggcccataatgggcaaggagcaataattctattactcacaattttatattataccaaagctcttgtccctttacaactgcatcctatacattaaatcggaaatgaataacatctccgtcttggaccacatattctttcccttcaaggcggacttttcctgcctctttagctcctgccataccgccgcccgcaagaagatcctcataagcaactgtctcagcacgaatgaagccccgctcaaagtcactatgaataattcctgcacactcaggtgctttcatgccttttttgaatgtccaagctctgacttcctgttctccggctgtgaaatatgttgcgaggccgagaagagagtaagacgctttgatcagctgatcaagacctgattcttgaatgcccagctcttccaagaacatttgcttttcttcgccttcaagctcagcgatttcagattcgatttttgcacatacaacgataacttctgcgttttcgccggcagcgtactcgcgaatcttcgctacattttcattgccagatggatcagcaacttcatcttcacttacgttggccacgtacaaaataggcttcgaagtcagtaaatggagctgcttcacaagcttttgctgctcctcagtgaattctacagatcgagcaggcttttcactctcaaacgcttctttcagtttagataaaatctcaaactcaaatacagcgtctttatctttttgcttcgcaagcttgctgacgcgtgtaatccgcttttcaaccgtttccatatcagcgaggatcagctcaaggttgatcgtttcaatgtcatcaatcggatcaacctttccggaaacgtgtgtaatgttgtcatcggaaaaagcacggacaacgtggcaaatcgcgtcaacttggcgaatatgagataggaacttgttgccgagtccttctcctttagatgcgccctttacaatccctgcaatatcagtgaattcaaaagcagtcggcacagtcttcttcgggttgaccagctcagtcagcttttgcagacgatcatccggcacctctacaattcccacgttcggatcaattgtacagaacgggtagttggctgattcggcaccggcctgtgtaattgcgttaaatagtgttgattttccgacgttcggcaaaccaacaattccagctgttaaagccattctttcatctcctctatataaaaccgtcattgtatgaacgtattttgaacctagagcaattataaggaggttcactggaaaagacaagctgacaaaaaagcattttcagcctgccaatccctttgattatgcttttttcaagcctactaaacagtcaaaaagcgtacttcccattccattatcagaatttgtatcatttgtcagtgcattgactgaccctccaaaagccgcccacatgccttcatctatattaatcgtcttcgcatgagcctgcttcatcactttcaccttgcccttcaagcgtccgcggtcattaaagataacaacttcgtctccattctgaagatcctgctcagccgctatatctggagaaatatcgacctgaacgtgctgaagcttttcaataaacggcacatgctgtgaatggttggaacgctgcggatgaatggataacagcgtataagggtacttttcagctaactcctcattatggaaaacagattcttcgggcacatttaattgaagcgagccgctaaatcctttttgctcagctagcgacgaagtaaattcaaattttccactcggcgtcaaaaactgataatcatcccacggcacctgttttactggaagagggaggtggcctttttcttttaaacgctcaagtgtcacatcctctgcttccaatgaagaaagccccatctctaaaaattcttgagtgctgtattcaaacagctcgccaaatccaaggcgttttgcaagctctgaccagatccagctgtccgacttcgcttcaccctgcggctccacaagcttcttcccgtactgaacataatgatgatacatactggaatagtagatatcttcttcttcaaaaacagtggcagtcggcaaaacataatcacacagctttgcggtatctgtcataatggaatcaatcgcaaccgtcatgggaaccttttcaaaagcttgtctcaccttatttgtattcggcacctgagtcagcggatttccgcacgtcacaataatcatctcaatcgcaggatcagcagcggtcaacacttcttcagcctgcgtcatcattgaaaaagaacgtgatgttgtttttaattccggcaacgtcagctttgtttttgcaaagctctcgccaatctggacatttccgaaattcgcgccgccgcccttaattccgacatttccgcttgccgcaacgagtgcatcaatccaacgaatcgttcccccgccgtttttatatcgctgcatgccaagccccataaaagtagacaccggaccatcagcatacaaaccggccagatactccagctcctccatagaagtttctgttttcacaataaactcttccagagaaacagttttcaaaagctctttcacatcatcaaaaccgacagaatgctcagaaataaacgtttcatccgttcttcccgtctcaatcagaaccttcaaaacggctgccgcaagccagccgtccattccaggctttacagagatatagcggtcagcaagcttagcagtcgggttgaagatcggatcaatcaccgtaatcgtggcgcccttctttttcacctgctgcaagtgatggtataagtgcatatttgttctggatacatttcttccccacacaacaacatgcttgctgttgtaaatatcaagcgggccgtgaccgtacgaacggccaaaatcccagctttgcgcctcgatgccggagccccagcatatgcttccgacgatttcagtcacgcctccatatccattaaaaaaacgctgatcaagcgcttttaacagaccgttattcgcataatcatggctgtgcaaaacagcagtcgtctccgacgtttccttgatttcccgaagtttatcggcaatttcatcaagtgcctgctcccaagaaatccgcacaaactcgccattttgttttttcattggatagcgaagccgatcaggcgaatttgtttttgtctcaagcattctgccgcggccgcagattttaccttccgtaatcggatggtttggatctccgtccacttttgttacctttccatcaacaacagtcaccaaaaagccgcagctgtcccaacaattcagcggacatgccgactgatgcactttgctcatcgccgtcttctccttaccttctatatgaaaaagcatgagtgtcggcctatttatgaagtaggctcctcatgcttgactagtactttttttagttttctttcaaattctcttctcggaatcataacactgtgagagcatccctcacacttaattcgaatatccattcccatgcgtataattttccagctgttcgctccgcatggatgcggttttttcatttctacgatatcattcaggccaaagtctttatccgccaagacccttcacctcttttcctaaactgctgtatctattgtacaaaaaaactgatcataagagcaatcaagatacccgaaaagaaatacatcctcttatttccatttactcaaaataggatataagagcagacaaactaacaaatacaaattgagcatcccatatatcggatacaagaacgcgatcaaatcagaaaatccgaaagaagtaaaaggcaccattaacactaacaaaatcaacacaatcacccatctcggcatatgaataaacgccatcagccggctggacagccccagcaaaccagctaccgtcgtcgtgtaaatcgccaggcacagcaccgccgtcatacataaaaaaaggaaataaggcgcaccctccagaacggcaaacagcggtatttcaaactgagaaagggagcccgccagctccaccaacgtttcattataaacaaatgagatcacgccaaaaataagaccgcttgccacacttgcgatttttgcttctccgagccctttcatctctttcccaacagaggataaaatcgcaacaactgaaaggatgtttaaagaggtaaacgtaatgctcgcaggccagttatactgctgggacaaatcaatcgtccacgtatggtgatgtgtgctctgaaaggagatcagcgcatataaaagccccgctactaacacaggaatcaaaatactatttatagataatattcctttcacatcccacaaaaacaaacacactgtcacgatgcaaatcagcgtgattccccaccagaaaggaagcttgtacatttgcagggtcacaccgcctccggcaatcatcaccatagtcgtcgaaaacaaataaaaaatgatgaggacatcataaattttcgccagccatggccccattaaatgctccagaaccggcagaaaatgagtggattgaactttaaaactgattttcatcacaatataagacgagaaaatgaacatgattgtaaacagcacaatagcaagtccgctttccgccccaaaaaactgccatatctcctgaccgctcgcataaccggccccgatcaggctccctaatatgagcagcatccacttcattccggctctccacaacactatcacctcatagacaaagttcagcttgtttccgttattgttactatataaataaaagaaagcaaacatgccatattttcatagacatttaaatacaaggtgaaattatcatacgaaatacacataaaaaaagactgctaatggaggcagtctaaaaatatatcatcttgcagtggaatgaaggaatgaacctcattaaccattcctatctataaagtgttttgtaagcaaaccgtagcttgatcatgatcgaggcaatgggggacaatatttataattcacccactaaccattcataataacctctacttttttaaaatctccggtgtcatacacaaagcataaaaaaccgtactgctggatatactgtaaacaaccttacataacgaaacacacaccatagcaattctgttacctactataacaaggaagtgaaacctatgaatcgaaaaggcgggcttttttcctctcaggaacgagtaaaacaatatgtttcacatacagatgcagctgcagcaaaacaaatccaaaccattctttcttcatccttacgtaaagctgccggcaaaccaattgttgtggtttgtatcggaacagaccgttcaaccggtgattcattgggcccactcgtaggaatgaaactcaaacagatgcagctcaccagattccatgtctacggaaccttatctgaccccgtccatgctgtgaacatgaaggataaaatcaatgacattcataaattacataaaaacccatttgttatagcggtcgatgcatgcttaggccgcgttaagagtgtgggttcatttcaaatcggggacgggccattaaagcccggagccggtgtacaaaaagaccttcctgaagtgggagatcttcatattaacggaatcgtgaatgttagcggtttcatggaatattttgtattgcaaaatacaagactcaacttggtcatgaatatggccaatgttctcgcggaaggattgagtttaacagatcggacagagtggaggcaagaacgccttaacccgttgcaaaggctcactgggcgcatataaaacaaaaaccatcttcgcttgaaagatggtttcttcatttacgattctcgttcagataaaagctctaaaatccggtcaaggtcttcattagagaaaaattcaatttcgattttgccttttttcttctgtcttttaatattaactgttgttccaaaataattttggaggtaggattcccgttcttttagaaccgcatctttcacaggttcttttttctttgtttcacgtggaacattctgattcaactgctgaatcagctgctcaagctggcgaacattgagctgctccgcaatcactttttgtaccagcggttcaagcttatttttgttttttaagccaagaagcgtgcgtccatgtcccatagaaagcgtaccttcggcaataagctgctgaatattttctggcagtgtcagcagtcttaaatgattcgcaatatgcggtctgcttttcccaagacgtttggcaagctgctcttgtgtgagatctaagtgtttcaacaaggaatcatatgcctgagcctcttcaagcggagataaatcttcacgctgaaggttttctaataaagcaatttccctcattaacgcctctgataattcacggacaatggccggaactgtatctaaacctgccagctttgccgctcgaaaacgccgttcacccgcaacaatatcatagccttttaaagattttctgacgataagcggctgaagaatgccatgctgcaacacagattcttttagttcagctaatgcctcgtcatcaaagtgttttcttggctgataaggattagggcgtaaatcggcaattttaatttcttcaactgtctcttcagacaaatctacctgattaaataacgcattaatcccttttccaaggcctttagccattcgcagccacttcctttgctaaatctaaatatacttccgcacctcttgaccgcggatcgtataaaatgatgggttttccgtgactcggtgcctcactcagacggacattacgcggaataactgtcttatatactttatccctaaaatactttttaacctcttcaatcacttgaatgccaaggtttgtccgggcatcaagcattgtcagcaatacaccttcaatcattaaatcagtattcaaatgcttttgcacaaggcgtactgtatttaataactggctgagaccctccaaggcataatattcgcactgtacaggaatcacaacggaatccgaggcagtaagggcattaatcgtcagcaagcccaatgacggcggacaatcaatgataatataatcataattttgctttactgcttcaagcgctctcttcaatctcacttctcttgatattgtaggaaccagctcgatctcagcccctgcaagctgaatcgtcgcaggaatcacatccaagttctctactgtcgttgctttaataatatctattacatctgcatcatctactaaaatatcgtacacacactgctctacatcggctttttcaatccctaatccgcttgtcgcatttccctgcggatcaatatctaccagcagaacccttttccctatgtaagccaaacatgccccaaggttgacagacgtcgttgttttgccgaccccgcctttttggttcgtaattgctatgatttttcccacgatgtcacctactttcacatgaacatgtactatcttgcttctattctatcaaaaaaagattaaagcgtttcatttttttcatcattttgttccgaatcagaagggaaataattgaaaattcaagcacgctttatgctttctcttataaattctgcaatttctatgtttttttgacttaaaaaaggaatttcttaaagaaaaaaagaagaagtcacggtacagaacgtggaaacaggatggtgagaaaatgatttatcaaacgaagagagatgtacccgttacgctgatgattgtgtttctcatattactgatacaagcagatgctattgttccttttgtgctgggaaatatgagagtttccggctggatcatttttattctgctgactcttttaaatggactcatcatttggagctttattgacctaaaatatgtattgaaggaacaccatctgatcattaaagccggattgatcaaacatcaaattccttatgaaaacatcgataaagtcgttcaaaaaaagaaactgtggtccggttttcgtctgatcggctctcgccatgccatcacaatatattatcaggggggatggggacatgcagtgatttcaccgcaaaaatctgaagaatttatccccaagctcaaagaaaagaattctaatataataatattcactaaaagtaagtgattaccttttatttaaaatataaaaagctctcctgcttttcaggagagcttctattttggtatgcgaatcgttaattgaatatattcttcaaattcttcttcttccgtattcaattttacaccgctgtcttccaccattgatagtgactggcgaatcgtgttcatcgcaattcttgtatctctgctgaatgctttgcgtctcggctttggctttctcttgccttgctccagcattttcaccacgcggtcttccgtctgctttacatttaaacttttctcaataatctctgtgagcagtgtgacttggagctcaggctgtttcagcggaatcagtgctctggcatggcgctcggtgattttcttctccataattgcctcttggaccggctgaggcagctttaataaccgaagcttattcgcgattgtagactgcccttttcctaagcgctgtgcgagtgcctcctgtgttaaatcatgcagctcaagtagcctagcataagcatgcgcttcctcaatagaagacagttcttcccgctgcaagttttcaattaacgccacagaagcggtttccgtgtcggaaaaatccttaataattgccggaatcttttcccactcaagcgattgcaccgctctccagcgtctttcacctgcaatgagttcgtattggccttcttcttctgtatgcctaacaacaatcggctgaataatgccgtgtgtatgaatggtcattgctaactctttgattttttcatctgagaaaatggtgcgtggctgaaaacggttgggaacgatagcatttaccggtatttccagaatctcttctttgtttgtatcatgttcagcaatctccggctccggttccttctcaccaagcccgaagaaacgagagaatgaatgcttcatgtacctacaccacctttaaaaactgccatttttataattctattttctcatggtttttcctgctgtacatccatcaattttgatgaaaatatgatggtattgtcatatcaggctgtctaaattacccttcaattggcgatttattaggagttcccggttttcttggatacttcttaggtgtattttttattttgcgtatcaccataatattacgatcgctttcttcaataggcagcttaaaagaatggatattctcaagttctcctccaagcgtcgtgattgcttttttgcctgcattcagttcttcttcagctgatgcggcttttaaagcaacaaataaaccgtttttcttcaccagaggcaagcaaagctcactcaaaacagataatctcgcaactgctcgcgctgtcacaatatcatagctttcacgcacgtctttccgttgcccgaacgtttcagctctgtcatggcagaatgttgtattctccaattgcaaagcctcagatagcttttctaaaaacgtgatccgtttattcagtgaatccacgattgtgacattgaggtgcggaaagcatatttttatcggcagacttggaaaacccgctcccgctccgacatcacaaatcgtgttcacctgattgaagtcgacataaaaagtagctgtaatggaatcataaaaatgctttaaatacacttcttttttctctgttattgaagtcagattgattttttcgttccattcaaccagcatgtcgtaatacagctcaaattgctccagctgacggggagaaagggagatccctttttccgccaaaccagaagtgaattcttcaatattcatgccgtcatcctttctattcggctatcttcgcaatgcgtccctgctctaaatacaccaatagaattgaaatgtccgccgggtttacaccggaaatgcgggaagcttgggcaacagacaaaggccgtacatttttcagtttttgacgcgcctcggtcgcaatccccttaattgcgtcataatcaattcgatctggaatttttttattttccatcttcttcagtttttccacttgctgaagagatttttcaatatatccttcatatttcacttggatttctacttgttctgccacgtcttgaggaactggcacttctggcggcgccagttttgtgactgtttcatagttcatttcaggacgcttcatcaagtctgtgccgcgaactccatctttcaattcgcttccgccaagagaacggatatattcttgattttccggagacggcttgataattacagaatgaagacgttttttctccgcctcgatcgccgcttttttcttctcaaaagccgcatagcgctcatcagaaatcaatccaatgcgatgtccgatttctgtcagacgcaaatcagcattgtcatggcgaagaagcaatctgtattccgcacgtgatgtcaaaagacgatatggctcattggttccttttgtcacaaggtcatcaatcagaacaccaatataggcgtcagaacggcttaaaatcacttcttcttttccaagcgcttttcgtcctgcattgattcccgccataatcccttgtcccgcagcttcttcataaccggaagttccgttaatttggcctgcagtgtaaaggtttgtgattttttttgtttcaagtgtcggccagagctgtgtcggtacgattgcatcatactcgatcgcatagccggctctcatcatttgcacgttttcaagtccaggaatcgttgcaagcattctttgctgtacgtcttctggaagacttgtagataaaccttggacatagacttcctgtgtatttctgccttccggctcaaggaagatttggtgacgcggtttatcattaaaacggacaactttgtcttcaatggatgggcagtatcttgggcccgtacctttgatcataccggaatacatcggtgaacggtgcaggttgctgtcaataatctcatgtgtctcagggcttgtatatgtcagccagcaagggagctgatctgtgatatattccactgtttcatatgagaaagcgcgaggcacatcgtcaccaggctgaatttccgttttgctgtaatcaatcgtgtcgcttttaacgcgaggcggcgtacctgttttaaaacgaacaaggtcaaaaccaagttcctccaaatgctcagaaagcttaatagaaggctgctggttatttgggccgcttgagtaagacagatcgccaagaataatacgtcctcttaaatatgtccctgtcgtcatgacaactgctttcgcacgataatgtgcaccggtttgtgtaataacgcctcggcattcgccgtcttcaacgatcagccgctccacaattccttgcagcaatgttaagtttggttctttttcaagcgtatttttcatttcgtgctgatattggaatttgtctgcttgcgcacgcaatgcacgaaccgcaggaccttttcctgtattcagcattctcatttgaatatgcgttttatcgatgtttcttcccatttctccgccgagcgcgtcaatttcgcggacgacaatcccttttgcggggccgccgacagacggattacatggcataaatgcaaccatatctaggttgatggtcaagacaagcgttttggcgccttggcgtgcagatgcgagggcagcctcaacaccggcatgcccggcgccaatcacaatcacatcgtattggcctgcttcataccccatgattctagttcctccttttattattttcctaaacagaattgtgaaaagagctgatcaattaagctttcgtggacagaatctccaatgatttcccctaaaagctcccagcatcttgtaaggtcaatttgcaccatgtcgatcgggacatcctgttcgatgccgctaagcgcatcttcaatggcgcgttttgcttgctgtaaaatagagatgtgacgtgtgttgctgacataagtcagatcaccgctttcaatggcacccgtgtagaacagtgattgaatcgcttcttccagatcattgatgccttcctcttttaaaagagatgtcgtaacaactggacgtccattggcaagctcacggacacgttcagtgtcaatcttcgcctcaaggtcagtcttattcaaaatcacgataacatccatgccctcaacggcttcaaaaagcttcacgtcttcatcagaaagctcttcactataattaagcacaagtaaaatcaggtccgcttcctttagaacctggcgagaacgttcaacaccgattcgctcaacaatatcctctgtttcacgaatacctgctgtatcaaccagacgaagcgggacgccccttacattcacgtattcctcaatcacatcccgtgtcgttccgggaatatcggttacaatggcttttgcctcatgaacgaggctgttcagaagagatgattttcctacgtttggccggccgataatgacggtagaaagaccttcacgtaagatttttccttgctcagaagtcctcagcagcgtctcaatttcctttttcacggcggttgccttttcgactaaaatctgatgcgtcatttcctctacatcatcatactccggataatcgatattcacctcaacatgggccagtgtttctaaaatctcactgcgcaaacggcgcaccaaagcagaaagacgcccttccatttgattcatagcaacgttcattgcccggtccgttttcgctctgattaagtccataaccgcttccgcctgtgaaagatcgattcggccgtttaaaaacgcacgtttcgtaaattcaccaggctctgccagtctcgctccctctcttaatgcaagctgaagcacttggttcacagtcacaattcccccgtgacagttaatctcaatgacatcttctcgtgtaaaagttctcggtgcttttaacactgataccattacttcctcaacgacacgatccgaaggtctgtctacgatatgaccataatgaatcgtatgtgattcgaccgagctgagtgttttccccttcggtcccttataaattttatctgcgatttgaatggcttctggtccgctcaaccgtacaatcgcaatcgcgccttctcccatcggtgtggaaattgccgcaattgtatccatgttgttcacctctctttacttatacttcatctatataaaaaaatttttattatgccaaaactaaaagataacatagtttggttcgaagtggaagatttgttatccacagaaatagaaattcgtcccttattactttaacttatccacatgtgaataacaattaattttatttcctgaacttcctttttatcaacaggatacacctaaaaagaaaaaacttaaacggcaaaaccttgatattactaggaaaagtagatttttcggatacaaaaaaaccgaaatccaatttttatcggacttcggttttatgctatcttttatgggaaataacgagatgacgattttcgccttcacccattgaatatgttttgatctggtggtttgcatatccagaaagagtatcgtgaataatttttctttcgctggacggcatgggctcaagctggatggattttttcgttttcaaaacctggtcagcaagcttgatggccagctggctcagtgtttcttttcttttcaaacgatagttttctgcatccaccgtcacatttttatattggcctggataacggttaagggcaagctgtgtcaaagtttcaagggcgtttaaggtttgtcctcttttcccaatcaacaatgctgccttttcacctgttatatgatatctcactgtctttttgctttcttgaacagtcacatcagacttcccggcaatggcttcggcaatcgtttgaagatataacttcgcttgctgaatcggatcaatcttttcaaccagctttacgatcgcaggctttttaccgaaaatgccgagaaaccctttgtttccctcttcaataacagtaatttctaccttatccttcgttaatcccagctcttgcaatccggactgtactgcttcatcgacatttcgccctgcagcagtcacattcctcactttttctttcctccggctttttgcggctcaggattttttttaatatcaggtcctttaatgaggaaagtttgcgcaatcataaacaagttaccaactacccaataaagagaaagagccgccgggaagttgatcgcaaatacgataatcataattggcataatccaaagcatcatcgccatttgcggattttgctgcgcattgccagccatcatcagtttttgctgaacaaatgtagcgacaccggcaacgataggaagaatatagtaaggatctttttctcctaagtcaaaccataagaagctatgctctgaaatcgcctgggttctcatgatcgcatgatagaatccaattaaaatcggcatctggatcaaaatcgggaaacatcccgccaatggattgacaccatgcttttggaataaagccattgtttcctgctgaagcttttgctgcgttttttgatcctttgagctgtatttttctttaagcttttgcatttccggctgtaaagcctgcatcgctttcgaacttctcagctgcttaatcatcagcggtaaaattaataaacgaattaaaatggtaactagaattattgaaagcccgtagttatctcccgtcaatttcgctacatacgtaatgagctcagacaatggatatactacgtacttgtcccagaaatgcggactatctgcagtgatcggctctttcacactcgagcatccagccaaaagcatgaatacgccaaccatacttaatagcaaccctattctccttttcaacaacatttcctcctataattaatctttacactcttttattgcaaagcatacttgtatgtattttagcatctttcagttttaaatggtgtctttttctgatcaaccagaaaggaagcgcttttaaaagttgtaagaaagcagtggtgatgcctactttgacgaagatttcttatataatgaagactttctgaatagatgctgcagactttttttcgtttcctcatatgtcagctggctcgccggttttctggcaataatgatgtaatccttttccttcagtctctctttctcctcaagaaaggcctgccgaatcaaacgtttgatccgatttcgcatcacagcattgccaatttttttgctgacggaaagcccgacacgcagttcatcattttcaggctgatcaagcgtatataagacaaactggcggtttgcaactgatgtcccatgtttaaacactttttgaaaatcttcatttttctttaaacgatttcgcttcttcaaatgactcactccgatactggctggcagaaacttttaaaatttattatgaacatgagatgcatctgaaccaggaagcatgccccggttcattacgcatcacatctatcttttcccataacgtgaaaaaagaccactgacattattcagtggcctaagctgataatacttttctgcctttgcggcgacggcgtgctaaaactagacgaccgttttttgaactcatacggcttctgaagccatgaactttgctgcgtttacggttattcggttggaatgttcttttcatttatgacacctccctcgaggaatagctgttaaagacagtcttacttattatatttgcgttacctattcattgtcaacttcactagtgcttttatttcttgcaaccataataggataccataccttttcaactttcgaaaccttattttttagattccttaattttacggaaaaaagacaaattcaaacaatttgcccctaaaatcacgcatgtggatatctttttcggctttttttagtatccacagaggttatcgacaacattttcacattaccaacccctgtggacaaggttttttcaacaggttgtccgctttgtggataagattgtgacaaccattgcaagctctcgtttattttggtattatatttgtgttttaactcttgattactaatcctacctttcctctttatccacaaagtgtggataagttgtggattgatttcacacagcttgtgtagaaggttgtccacaagttgtgaaatttgtcgaaaagctatttatctactatattatatgttttcaacatttaatgtgtacgaatggtaagcgccatttgctctttttttgtgttctataacagagaaagacgccattttctaagaaaaggagggacgtgccggaag

SEQ ID NO: 6 - DNA, 4089676 bp, Bacillus subtilis; identical to SEQ ID NO: 1
  source 1..4089676: mol_type = genomic DNA

SEQ ID NO: 7 - protein, 561 aa, Lactobacillus reuteri
  REGION 1..561: note = Description of sequence: putative multidrug resistance protein EmrY
MTKRKNKFLIIIAMCISIFLCMLDTTVMNIALPAIQNELHVTLTNLSWALNIYTILFASLTIPLSKLAEKLGMNFLYIIGLIMFLIGSSISGISPNLAILILGRGIQSLGAAILFPLSMTIGINIVTVKTRKKVIAALGITQGLAAALGPSIGGILTQFMGWHSIFSVNIPFTILSLVICLSTFNFHEPKSNEGNDYLGSLLGIILLSALTLILTQGRSWGWKSPAINLLFFIFILTFILFLITEHYAKAPMIPLVLFKNREFTGSAVSIILSNLFLVAVTVILPTYFTHIQHRTELEAALLITPITGMIFIMSPLSAILLDKLGSRAIILSGFLLMGISYYLFTHIDMDNITLIIFTCIILGTGYGIIAGPITVLAASNFEGYLLTASQSVAGVLRQVGVSLAVAIFLTGLYGNLNTAKHNSISYINQQVNNLNIPKYQKNKIRDNSIKSLNNNSNSRTPSKHFSKKLIKETTDKEYTKQINSLPYEPSKIQEKEIYSHTKANVKLVFHRLNNSINITIKKIKTYANSQYSTAFIKLYKVSLPFLIFSCLSCLLFPKRKK

SEQ ID NO: 8 - protein, 698 aa, Lactobacillus reuteri
  REGION 1..698: note = Description of sequence: 3-oxoacyl-[acyl-carrier-protein] synthase 2
MTAVIVGIGITSSCGESFTEIEQNVGKGKTGISNIDYFDTSELTCGIAGNLSKKIWKEVLQIADKNELDWSSSLSIYTIQRLLESYNISKKQRIGLSLGTCNGGIHSLAEYLDTSNDKFLKNYPPYIQSKDIAHYFNFNGPKYSFNSACAASANAIAYGAEMINNSDADLVVTGGCDPMSEWVFAGFNSLRTFNSKNCMPYGEEYGLNLGEAATYFLLEDKDKAIKKGHRIYAEILGHGLSNDAYHPTAPDKDGSGISYAIKMALKNSGLKPEDILYINSHGTGTKANDSAEYRGFKTVFRNEMPFISSMKGYVGHNLGAAASTELAISLIGMNSQKVLYPNFNLTKYREDCNDEHILKKPYSLDGYEDINFINNNAAFGGQNVAVIFHVNLEGKYGHSEKKLKTQQPIYINNFGVASDKAYMTKHGIGILDDLRPLKKKYPKLYKRRMNMLTQVSIIAAKQTLQDQYSNCGLVYGTPFGSLSSTLKYVDSIQKYGFKNASGAYFPDLVINSTTGHICQALSLKSYSSSISSGGDEDLRALIIAHNALNKGYASTMLVGAGQEETELGNKVLKREVNNHATFLSLSNKKMQETIAEVLSSGAMGFKNKKELLTIIRSKIDEKLANDADLKVIIQNNSEITNDELISYFKNDNNISINSDNFADSNFKSFVNHRNENRLLLVGISQVNDVSFADIKKIK

SEQ ID NO: 9 - protein, 90 aa, Lactobacillus reuteri
  REGION 1..90: note = Description of sequence: acyl carrier protein
MKHSIEEIKDILKEKVLIERLELDDVEPNDISDNENLFDEEGLALDSVEALDIMTGISEEFGIDTSMLGQEDINHFQSVNDMAKYISENE

SEQ ID NO: 10 - protein, 239 aa, Lactobacillus reuteri
  REGION 1..239: note = Description of sequence: 3-oxoacyl-[acyl-carrier-protein] reductase FabG
MKSVLITGITGGIGRKLTEAYSSKGYHIYGTCSRNSDSLQQFKEKWPSVEIIQINHDDLIDVSTEYSFFFRKVQPDIVINNAGIVKDNFLVQMSVNDFQEVLTTNLISAWVIVKEMLLHLNDNKIHKIINVASISGIIGREGQCNYAATKGGLVGLCQLIEHLAPKGSNVISFSVAPGLIDTDIKGKMPKKKIDNLKKATLANRLGTPEEVSKFIFKLSEEDISYSDGTLYRIDGGVLK

SEQ ID NO: 11 - protein, 174 aa, Lactobacillus reuteri
  REGION 1..174: note = Description of sequence: hypothetical protein
MKIINNTIQVTDLLQSYGKDEKDIVIIGPSPFNELDCLKETKIIDKVQLNLEEVFSFVKNNSVALMKKRRGTIAFLLNPQSFEGGNNIYSPIYNSAIKSFLKSLSKEMNPFRVKVMGIILPLTQDTKSTRKYDLVTLKYKGINNEKQVQDILSLLKLSEILNGQIVSLGAELNL

SEQ ID NO: 12 - protein, 111 aa, Lactobacillus reuteri
  REGION 1..111: note = Description of sequence: 3-hydroxyacyl-[acyl-carrier-protein] dehydrataseFabZ
MITALQQFGNEEFFFKGHFPNNPIVPGVLLTESIAQAGLILISLLEGQKVKIGYLAQIEKTKFFKEVYPDEQVKVKCSLKKKIGKYYYIAGEVYSQQLNKRCMRATVIVCI

SEQ ID NO: 13 - protein, 298 aa, Lactobacillus reuteri
  REGION 1..298: note = Description of sequence: Metallo-beta-lactamase superfamily protein
MIKITENIVQIKLKQGKNYPDVNVYVLLKEKVLIDIGPKSINTLNLLKKELARLGLSFETLNLIILTHHHVDHVGLLEYLPSGLRIVGPDHLDFYSSDIYKKSIQKLLVDDNLSIEFKNDIEKQLTTEIIPSINRENYVPFSESKKILQQFGLTAVELSGHSSEDIVITDSENNCFTGDIIIPKIFFNCIYEVDKVRPKHQRWSYYHELNFLDRLVNLVLPGHGDILKLEELKKAVLVNRKRMRRTEKKIIRELNKETVNGVENVCRSVFQSFLPYSKFLPFSEVVSVIESNDERINY

SEQ ID NO: 14 - protein, 183 aa, Lactobacillus reuteri
  REGION 1..183: note = Description of sequence: hypothetical protein
MRELTIDIIYINTLNNNSFASLDSRKRIKKLQHQLGQYMLSQISYKKGYSISHSHMCVALASYVNRVGIDIELINKTKKARIQFLSKSEKQLVNRYGFTRIWTLKEAIAKYHTVGLPRLNTVEIKEINASNVIYFVNKAPRKLQYKFLDIIPSYRLSVVAKKVSSFCIRITQEEDLKGLIRRM

SEQ ID NO: 15 - protein, 177 aa, Lactobacillus reuteri
  REGION 1..177: note = Description of sequence: Transcriptional regulator PadR-like family protein
MQGRDIILGILERNNRTGYEINDILKNQLSYFYDGTYGMIYPTLRKLEKEGKIKKEKIVQNDKPNKNVYSITDTGIEEFKEYLDSSIQDDIYKSDFLMRLFFGNSLPNQEIIRAIKQEIQRKNEKIDQLTVNYKKWKKNGMSKTQEITVKYGIAQYTAIVQMLTKELDTLRRNEMDD

SEQ ID NO: 16 - protein, 317 aa, Lactobacillus reuteri
  REGION 1..317: note = Description of sequence: Polyketide biosynthesis malonyl CoA-acyl carrier protein transacylase BaeC
MSLGIIFSGQGAQKSKMGLDFYEDPLFAELLNHASNISGLNMLKILENKNNELTETVNLQPTLTTLNYGIYRMLKRDIFDMKVSCMAGLSLGEYSALIASNALTFEQGIQLLVDRGKYMQEASNSNAGKMLALIKPKLKEITQICALCKVEIANYNSPKQIVIGGQNLQIEFAKKMIMERKAALRIIELEVSGAFHTSLFSNVQKQLEKRLKDVKFENPQIPVVSNTTVEEFQKESLTAVLSKQVANPTYFEKDIKLMKNTYGLTHIVQIGPGKALSNFVKQMSLGIKTYNISNIKDYRKFLNSYRDINLKGKKNGF

SEQ ID NO: 17 - protein, 142 aa, Lactobacillus reuteri
  REGION 1..142: note = Description of sequence: Biotin carboxyl carrier protein of acetyl-CoA carboxylase
MDFEKIQQLIQMFESSNTRELKIDDNNFHIYLTKNVSKEPIHDIKFESNKIQQASEAKANRKTITAPLVGTVYLASSPTSKPYVQVGSHIDKGDTVCVIEAMKLMTEIKSEVTGTIEKVNVENGELVEVGQPLFSVSGEKES

SEQ ID NO: 18 - protein, 459 aa, Lactobacillus reuteri
  REGION 1..459: note = Description of sequence: 2-oxoglutarate carboxylase small subunit
MFSKVLVANRGEIAVRIIRTLHELGIKAVAIYSIVDQESLHVQLADEAVCVGGARPQDSYLNTTNILTAAIGTGAQAIHPGFGFLSENAEFARMCEKCGIVFIGPRAATIDLMGNKENARETMQKRGIPVIPGSSSYITNSYDAKRVADKIGYPILIKAAAGGGGKGIRRVVTPEQMKQEFNNAQREARISFGDDRMYLEKIMCNVKHIEVQVVRDRFGNSVYFPERDCSLQRDKQKIIEESPCSVINSEQRKILGRYAIKAIEAVDYLNTGTIEFLMDKNNKFYFMEMNTRIQVEHTVTEMVTGIDLVKVQLMIASGEELPFSQNNIKLNGVAIECRINAEDPKNNFVPSTGKINYLYLPVGNLGMRIDTALYSGEKITPFYDSMIAKVISHGHTRVEAINRMKRLMQELVIKGVKTNKDLHLSILGDSSFLKDTVTTEYLEKNFLPIWKEREKNAAV

SEQ ID NO: 19 - protein, 279 aa, Lactobacillus reuteri
  REGION 1..279: note = Description of sequence: Acetyl-coenzyme A carboxylase carboxyl transferase subunit beta
MQLYESATLTKQHVKANIKANQKVPDGMLKKCPKCGKIFLSTEFDKYFSCPGCNYGFRIGSWQRVAWAVDEFYEEDGSRELITSDPLHFPNYVKKIQGLQKTTKVNEAVLTGKAKIKDQIFECGIMDPHFIMGSLGTITGEKITRLFERATKERLPVVLWTASGGARMQEGIMSLMQMAKISQAIAQHASKGLLYIVILTDPTTGGVTASFAMQGDIILAEPHTLVGFAGRRVIEQTIHERIPDTLQDAENVIKHGFIDLIVSRSEEKSLLYKLLKYGR

SEQ ID NO: 20 - protein, 251 aa, Lactobacillus reuteri
  REGION 1..251: note = Description of sequence: Acetyl-coenzyme A carboxylase carboxyl transferase subunit alpha
MAIVKAARSDNKITAKEIIEEVFSDFIEFHGDRKGTDDSAILGGLAILSSTPVTVIATNRGETVGEHLSTHFGCPTPGGYRKALRLAKQAAKFNRPIIFLVNTPGAYPGKTAEEQGQGSAIAQNIIQISQLPVPIITIIYGEGGSGGALALACGDQVWMLENSTYSILSPEGFASILWKDGSRTEEAAELMQMTPKALLRHKVIEGIIPESKDHKVTCRAIANILDKQLQELGKLSAVDLLIQRKERYRKF

SEQ ID NO: 21 - protein, 143 aa, Lactobacillus reuteri
  REGION 1..143: note = Description of sequence: bifunctional biotin--[acetyl-CoA-carboxylase] synthetase/biotin operon repressor
MHDLLSLNRIKELYKEKAMTNCNFFYFNKVDSTQKIAKYFLDHLNINKPCTIFAGSQTRGYGKRNRLFYSPQNSGIYMSIIIPQYEMQNEDIGLLTISLGSGILEVLKKYYPKKIFYLKWVNDILLGKVNYSAINDRASGNTK

SEQ ID NO: 22 - protein, 61 aa, Lactobacillus reuteri
  REGION 1..61: note = Description of sequence: Mersacidin 1
MEEKELEGVIGNSFESMTVEEMTKIQGMGEYQVDSTPGYFMESAAFSALTANITRHAMHHH

SEQ ID NO: 23 - protein, 76 aa, Lactobacillus reuteri
  REGION 1..76: note = Description of sequence: Mersacidin 2
MDKEELEKIVGNNFEEMSLQKMTEIQGMGEYQVDSTPAASAISRATIQVSRASSGKCLSWGSGAAFSAYFTHKRWC

SEQ ID NO: 24 - DNA, 8742 bp, Lactobacillus reuteri
  misc_feature 1..8742: note = Description of sequence: full sequence of the mersacidin cluster
  source 1..8742: mol_type = genomic DNA
ctattttgaccaatcgaccaaagaggaggttattatccactattatagtgaatcactcatgcaacagtatctgaataaagtaatataatatcagaagcaataaatttatttttctcagtatcctgctgcacttctaccagtttacgatatattattgaaccattatctaagtcatctaccttaaaattgtacaagacccacctgctatgtgggtaggtaataaaaagtcataaaaaacattatggagtaataagtgtaaagtaattacaggctaatcaaaaaagcagtaaataataactatttactattcttaatcatattcccataaagcatagtagagaaaataataactatacttgcaatcattctgtaattcatagtttgaattgcgatcattgtcactgccccacttaaaaataacaataaataataaacacttttctttattatttctaacatattagtttcctttccatgttaaatattcttgaaatgtttcaaaatttatcaaattatttgttttccaatacataacttcctcactttcatcaccacttttttctctaagttcaataaccttttttaagataataaaaacttcttcaatagcggagcttgaagaatgataaaacaaagacttgtcattgatgcgtttttgaatttgctttctaacacttgtaacccattttttatctctcaattggtattctaatgcattgcagtttgcaataacttttcctcccatacttgtaagtactttacacaaataacctgttactgtagtatttccatttgaattacaagtacttaaaactaaacacggtttaccatctaagcgtaaggtatgtgaccaagtagaaagcttttctaatattaattttaaatctgacgaaatattatgcatatatactggagaagcaactacaaaacagtctgatttcaatatcatttcttctaactcgtaaattttggaatcaccatttctttgagtatagctaatatcatataacgtattcgggttgagtctcatcttgttaaagtctctacaaaacaaatattgaactttatactctttgctatctagattgttaaagaggctttctaaaaagaattgcgtcgacccttgatatctacaactgccgttcagtactaatatccgtttcaaattcatcatcctttcaaaaaagaggctgggaaaatttttcaccggcctcattctttatatcaaccttgttaagatatcatggggattaaccacaaggcggttaattactctagcaccatcttttatgagtaaaataagcactaaatgctgcaccactaccccaacttagacattttccagaagatgcacgtgatacttgaattgttgcccgtgaaatcgcagaagctgctggtgttgaatccacttggtattcacccataccttgaatttctgtcattttttgtaaactcatttcctcaaagttattacctacaattttttctaattcttctttgtccataacaaatacctccctttaatgatgatgcatagcatgtcttgttatattggctgtaagagctgaaaaggcagcactttccataaaatatccaggcgtcgaatctacttgatattcacccataccttgaatttttgtcatttcctctacagtcatactttcaaacgaattccctattacaccttctaattctttttcttccataattttcaccccctttcaatttccaaaagtaatggattagttttaagccctttatgacataataaggataaaccgatacccgaaagtccatcaaataagcctaacgcagaaaactttccaaatcttctaatagaatagtccttatttaatatgtaatttcctagcataatattagttagtaagttggtcttttccttccatttagtagaacccgtctgcataaaaagttcatgcataatcataattattcctgcttttccgtggcataatgtatcattccttggcgcattttctaaatcatttaatttttcttgtgcgtaattattatcaagttgcatataattacgcgctaaaagcattccagatactcctttacaccatcccatatcattcttcacaggagtaatttttttcattaaagcacttgcttggtctagctgcccaatttcatataagcacattgcgtctccacaattaccatgcgcaacaccgaatttacctgaatgcataatacaattcataaactttttttctaatctattcattacattttgtgagatgtatttaaatccaaataatcttttctgtaaatgtaaaagttttataattccacctaaaccattaataaaatcactaattagttcgcctttttcaatgttttgctcaatcttcttttcaagctgttttaaataagccacttcttcataatccaaagttttataaagactataatgaaataataatgggtatagtggcgataaaaatcccttaaaggctccttgtacctccagatctaatgacatattaatggatgcttttaatagtttcttcgcaaattctttatatctagcttcgtttttttcatatcctaattgtataaagaatactgttacaccactaattccacaatatagactttcatccataggtaaaatatcccaattgcctgcattattgatatttatggtcgaaataataacactattttcatcttcgaatgcactattcataatagtatccgcaatactgcttgcttgtctcacataattaaattcttgatctaacaaatctcgacttttctttcttacatcagtgattctatctcctactgataaagaagctaatagaagtcctctttctttttctatcgtttcgtaattgaaattattgattctatctaatgcaaggttaagtcctgatttcttaaaatatgcatcataattttttcctctactatcagtaatacttgtcttcccaactacagcagaaaaatagggaacatccccaaacagtaaatcttcaacttcactatttactattctcttatcatcatatggataagcagcaatatttaacattagcctttcacgatatttcatttcaacattataagatgggtgtgctgcataatttaacatcgtttcataacgttctgtactcttcgttaaaatacgaattctaaagtttgaaaattctttaacttgtttttttaactctttaatattattactaacaaaacttgtcattttgttataaccatctagaatcgctaatctatatttttttacattaacttctttattattacaggtaattggaatattttccccgcctttaacgtatccttgtcttctcatttcaaaatgaaaatttgaattttcaatatttacgggtacgagtactttatttttcaataaagtttctcttccttctagtccacttagttctatcgcttcattatttcccattggtaatttcgtgggtaataagcaggaaccctttatcgaatctctattcaaactcattaaatattttccaaacgcgttttgaggagtaattaatgaattttgaaacatcgtttctccatcaacaagaattggttggtccttttttgcaattatattctctaaatgcaaatcgtttagccctaataaataagaaataacaataaggtatccataacgttcataataatcggcacattcgtctttacttattacaggaacccgtgttacaaattcaaaaaaagcataatctttataaaataatcctttaggtaaaaaatctatatcaagtaaagttgaactagacttattaatccaattacaaaacttttcaaattgctgaagaattctaagatcacgaggtttatatactatttttttatgatttaattctaagattataactgtatttcctttgcaatgggaatctcccactccaatttctatattagttaagacaatgttttcttgtttaagatgtaagaaattacaaagatcatttctatgggtgccaattgcctcaccaagttttgataaatttgtcacaaaaaaattgacgcgcgttattattattctagataaggttggatactttcttaaaaacgctttaaatctagtttcattacaaaagttttcttttataaaagacgatagtacatctgtatcagcttgactaattcttataccagattttattttctcttttttatatttatacaactctagtgctagcactttcccactttgtctaaataaatcattgattagaaactcactcatagcttcgctggctttagtagtaattctaatttgatgattccacccatcgtctatcctctgcattgcatattctacaaaaggcttaaaaaatacatctagctttaatttatgcaaatgtatgttactaaactgaaatttttcaataatttcaaccaattctttttcgaaagggatctccgaatctactttaattaacggttgtaatgttttcttaaaatcatctaacagcaaatgggcattactacagtactctgttaaatcctgttcattaaataaagtgcgtgtgtttttccattctttataatatttatcatccagaaacggtttactatatatagcacgttcttcaacggtaaatgcatccgttaaatttaaggttttcatattacagtcctccatttgtatttatattttaaggattttctataaaaggaatactttttttattaaacgcaccatattatgaataactgcgtttatagctaacttcaaaagctattaactgtttaaggttcattctgtataaacaaacatatgaagttttctaaaataaaaaccgtcctaaaactgttagattgtataaccacaattttagggcagttttttcttaaattgttttattattcacctattttgagggttcatattacattttttgtcatcctatgaatttaaataagtttttttctttttggttaattcttcataggtaccagcttcaactattttcccattttttaatacatatactttattagtggacttagcaacagctagtctatgagtaataaaaagaattgttttatgtaatgtcattaaatttttaataactttatgttcagtaatgggatctaggccactggtagattcatctaatattaatatttttgctggcgataaaattgcccgagctattgctaagcgttgactttgaccaccagaaagaattaagccaccttcatcgagctttgtgttgtactttaagggcatttcatcaatttcattgctgatacatgctattttgcatgcatttataatttcttccatactcttttctttatcacatccaacgatcaaattatccatgatagatcccgagaaaaggtatgtttgctgaggcacatagcatataaaatttcgtaattgataagtactaagttgattaatcttaactccatctactaaaatatctccactatttgattgtaaaaatcctacaagtaatttagctattgttgattttcccgacccactttgccccagtaatgccactttctcatcatttttaatccgtaaatttagtttttttaaaacttctttattattagcataatgatatgaaacattctttatcactaattctcccttgcttaataaattaagattattttttctttgttgtagtgtgataccattttgttcttttttcgaaagcatcacatcatttaatctatcattcgctacctgtgcattttgcaatttgggctgtaaattaattaaattttgaattgaactagtaaagtaactaaataaagcattgaatgcgaaaagttgtcctagtttaaaatcattattcattattagatatgctgcttgccatattattaaaatatttaacactaactgtacaaaaacttttaatgattcttgtatcgaattagctatgttatatttcatcaaagtttttaacaagttagtaaagctattttcgatttttgcataaaattttgtttcagaatttaatgatttaattacttctataccttttatactttcaataagtaatgcttctaactctgcattcctgatcattactttcttacttaatctatcgaataacctagtaaaagaaataattattacaaaataaattggaaaagaaaatactgctagaaaaaataaatccttactttgaaaaaataaagcacttcccaacgtagtaacaattattgtatctagaaaaagtgtaacgactgaaccagctaatgcttctgtaattttatttgcatcattaaaccttgaaacaatatcacctgttgttctagacgaaaaaaatcctatctgcaaatcaaataatctttttataaaatttaaaagaatatttttcgataagttctgtcccaatactactagtgcaattttttctaaaaaagaaaaaattgcactaaaaaagtataggattatcaatccaaacactattatagatagtaagttatatttactttttggaatcaatgaatcaattacgaactgtaaggataacgaactaattatatttattaacaatgtaaagattgcaaatagcaaaatttttattagaagcaatttattactaaaaagttgcttaaataaatagttaaaattagattttctttcatcaataggaataaagttgtctgctttcgaaaaaaatattgctgctccactccattccttaataacttcatctatttctttttttatggtccctattgttgggtctggatcagcaatatacacttttttatttttaatttttaaaactacataataatgcaaaattttttcttcttttacaatatgaattataaaaggaaatggtaacttttcttttaataaaaagttgttttttgcttttaccgccaaaggctctaatccatactttttagaagcttctactaagccataaatgttcgtacctgaaatactagtattagcagcattacgcaaatgttctagtgaaactcgactaccaaattctttaagtatcattgctaatgctgccactccacaatcctcttcatttacttgaggaatataattacgataatacatatatcttcctcccacctaatcataactaaaataaattaattcgtatacaattaatattaagcgtatggcttttcgattagacgcaaaaaaaggattttacaactaatttagattcaattataattaactaaatttcaaatttattatattggagtaatgtatatgaaagacactaattatataaaaaaatctctagagaatcgcgaaattcaaaaactgactgaagatgaaatgaaagctttcattggtggaactacttatcatattaactacgatggatatgcgccaagtaggaatccatgggcttggctaactcactgggggcataaacactaataatgaactatataaatccattttacttatatgggttagaattttttgatttatttattaacacattgttaataaataatatagctggtaaaaggaaaataaatctactttcaatctttgaaataggagttatagtcttagtattgggctattatggatatacaatttacattgcatatgcacttcttttcttgtataaaaattttaaacataataagcgggtcttgaattttgaagcgcttattatgtttgtatgcagtttatttgtctttcttatctcaaacattaatagtttcattctaaacacctggtttttaccacattatagtaacgatgttttaatacgttttcaaatagtaatttctgttattatttctataatgttagttagtatttcgtttttttataatcctttattttcgaaaatttcgaacaatttatttttaaaatataaaggtccaattttaagaaaatttgtaattacttatgaagtttctttcttctttattataggtattgcttctattgctgaatatttaaaaatagaatttaaaattcaatggcttttaattttatgctttctatttctttcattaagcgtaattatactgaccggtattatgtttacatacaatagtaaaatgattcagctcgaggagattagaaatagttatattaataaacaattgtattggaaaagctttgaatctaactataaaaagttgagaaaactgcatcatgactatacgaatcttttaataacgttaataaggttaattgagaataatgactttaaacatgcaaaatcctatgctaattccttattagattacgatagtaaagtatattcgcctccttcattcgatattatacaaatttctcaaaaaatttataatcaagaattacgagcattatttttagaaaaggtgaatataataaaatctcagagaattaaattgcatttggaaatttctgataagatcgctataccgtctaaattattaattgatctattaataattattagtaatttactagataatgctacgagtgcagctttacagagtgaccaaaaatctatttctataagcttaaaaaaaacgctctctaattgttataaatttactataaagaattcaataaaatctaaaattaatattgaagaattatttactgaaaatttttcaaccaagaaaaaccatatgggaataggacttaataatgttatttcaataattgacagttcaccaaatttctttttagaaacaaaatcttttaatgaatggatcgagtttgaactaatattaaagaggtgatgtctt

SEQ ID NO: 25 - protein, 53 aa, Lactobacillus reuteri
  REGION 1..53: note = Description of sequence: hypothetical protein
MLEIIKKSVYYLLLFLSGAVTMIAIQTMNYRMIASIVIIFSTMLYGNMIKNSK

SEQ ID NO: 26 - protein, 189 aa, Lactobacillus reuteri
  REGION 1..189: note = Description of sequence: NADPH-dependent FMN reductase
MRLNPNTLYDISYTQRNGDSKIYELEEMILKSDCFVVASPVYMHNISSDLKLILEKLSTWSHTLRLDGKPCLVLSTCNSNGNTTVTGYLCKVLTSMGGKVIANCNALEYQLRDKKWVTSVRKQIQKRINDKSLFYHSSSSAIEEVFIILKKVIELREKSGDESEEVMYWKTNNLINFETFQEYLTWKGN

SEQ ID NO: 27 - protein, 76 aa, Lactobacillus reuteri; identical to SEQ ID NO: 23
  REGION 1..76: note = Description of sequence: hypothetical protein Mersacidin 2

SEQ ID NO: 28 - protein, 61 aa, Lactobacillus reuteri; identical to SEQ ID NO: 22
  REGION 1..61: note = Description of sequence: hypothetical protein Mersacidin 1

SEQ ID NO: 29 - protein, 980 aa, Lactobacillus reuteri
  REGION 1..980: note = Description of sequence: Lanthionine synthetase C-like protein Lanthione synthetase C-like protein
MKTLNLTDAFTVEERAIYSKPFLDDKYYKEWKNTRTLFNEQDLTEYCSNAHLLLDDFKKTLQPLIKVDSEIPFEKELVEIIEKFQFSNIHLHKLKLDVFFKPFVEYAMQRIDDGWNHQIRITTKASEAMSEFLINDLFRQSGKVLALELYKYKKEKIKSGIRISQADTDVLSSFIKENFCNETRFKAFLRKYPTLSRIIITRVNFFVTNLSKLGEAIGTHRNDLCNFLHLKQENIVLTNIEIGVGDSHCKGNTVIILELNHKKIVYKPRDLRILQQFEKFCNWINKSSSTLLDIDFLPKGLFYKDYAFFEFVTRVPVISKDECADYYERYGYLIVISYLLGLNDLHLENIIAKKDQPILVDGETMFQNSLITPQNAFGKYLMSLNRDSIKGSCLLPTKLPMGNNEAIELSGLEGRETLLKNKVLVPVNIENSNFHFEMRRQGYVKGGENIPITCNNKEVNVKKYRLAILDGYNKMTSFVSNNIKELKKQVKEFSNFRIRILTKSTERYETMLNYAAHPSYNVEMKYRERLMLNIAAYPYDDKRIVNSEVEDLLFGDVPYFSAVVGKTSITDSRGKNYDAYFKKSGLNLALDRINNFNYETIEKERGLLLASLSVGDRITDVRKKSRDLLDQEFNYVRQASSIADTIMNSAFEDENSVIISTININNAGNWDILPMDESLYCGISGVTVFFIQLGYEKNEARYKEFAKKLLKASINMSLDLEVQGAFKGFLSPLYPLLFHYSLYKTLDYEEVAYLKQLEKKIEQNIEKGELISDFINGLGGIIKLLHLQKRLFGFKYISQNVMNRLEKKFMNCIMHSGKFGVAHGNCGDAMCLYEIGQLDQASALMKKITPVKNDMGWCKGVSGMLLARNYMQLDNNYAQEKLNDLENAPRNDTLCHGKAGIIMIMHELFMQTGSTKWKEKTNLLTNIMLGNYILNKDYSIRRFGKFSALGLFDGLSGIGLSLLCHKGLKTNPLLLEIERG

SEQ ID NO: 30 - protein, 716 aa, Lactobacillus reuteri
  REGION 1..716: note = Description of sequence: Lactococcin-G-processing and transport ATP-binding protein LagD
MYYRNYIPQVNEEDCGVAALAMILKEFGSRVSLEHLRNAANTSISGTNIYGLVEASKKYGLEPLAVKAKNNFLLKEKLPFPFIIHIVKEEKILHYYVVLKIKNKKVYIADPDPTIGTIKKEIDEVIKEWSGAAIFFSKADNFIPIDERKSNFNYLFKQLFSNKLLLIKILLFAIFTLLINIISSLSLQFVIDSLIPKSKYNLLSIIVFGLIILYFFSAIFSFLEKIALVVLGQNLSKNILLNFIKRLFDLQIGFFSSRTTGDIVSRFNDANKITEALAGSVVTLFLDTIIVTTLGSALFFQSKDLFFLAVFSFPIYFVIIISFTRLFDRLSKKVMIRNAELEALLIESIKGIEVIKSLNSETKFYAKIENSFTNLLKTLMKYNIANSIQESLKVFVQLVLNILIIWQAAYLIMNNDFKLGQLFAFNALFSYFTSSIQNLINLQPKLQNAQVANDRLNDVMLSKKEQNGITLQQRKNNLNLLSKGELVIKNVSYHYANNKEVLKKLNLRIKNDEKVALLGQSGSGKSTIAKLLVGFLQSNSGDILVDGVKINQLSTYQLRNFICYVPQQTYLFSGSIMDNLIVGCDKEKSMEEIINACKIACISNEIDEMPLKYNTKLDEGGLILSGGQSQRLAIARAILSPAKILILDESTSGLDPITEHKVIKNLMTLHKTILFITHRLAVAKSTNKVYVLKNGKIVEAGTYEELTKKKKTYLNS

SEQ ID NO: 31 - protein, 57 aa, Lactobacillus reuteri
  REGION 1..57: note = Description of sequence: hypothetical protein
MKDTNYIKKSLENREIQKLTEDEMKAFIGGTTYHINYDGYAPSRNPWAWLTHWGHKH

SEQ ID NO: 32 - protein, 437 aa, Lactobacillus reuteri
  REGION 1..437: note = Description of sequence: sensory histidine kinase DcuS
MNYINPFYLYGLEFFDLFINTLLINNIAGKRKINLLSIFEIGVIVLVLGYYGYTIYIAYALLFLYKNFKHNKRVLNFEALIMFVCSLFVFLISNINSFILNTWFLPHYSNDVLIRFQIVISVIISIMLVSISFFYNPLFSKISNNLFLKYKGPILRKFVITYEVSFFFIIGIASIAEYLKIEFKIQWLLILCFLFLSLSVIILTGIMFTYNSKMIQLEEIRNSYINKQLYWKSFESNYKKLRKLHHDYTNLLITLIRLIENNDFKHAKSYANSLLDYDSKVYSPPSFDIIQISQKIYNQELRALFLEKVNIIKSQRIKLHLEISDKIAIPSKLLIDLLIIISNLLDNATSAALQSDQKSISISLKKTLSNCYKFTIKNSIKSKINIEELFTENFSTKKNHMGIGLNNVISIIDSSPNFFLETKSFNEWIEFELILKR

SEQ ID NO: 33 - protein, 1008 aa, Lactobacillus reuteri
  REGION 1..1008: note = Description of sequence: sensory histidine kinase DcuS CDS
ATGACGTTAGAGATATTATTACTTGAAGATAATCTTTTGCAACTTCAAAAATATAAGAAGATAATCCAGAATAGAATTATGATTAATCCTAGTAATAAATCTTATGATCTAGAGCTTGCACTCTACTCATCAACTTCAGATGAAATACATCAATACCTCCATAATAATAGTAAGAAAGATATTTTTGCCTTTCTTGATATTGAAATAGGGTCTACGTATTCAGGAATAGATATAGCAAAAGAGATTAAAAATACTGAAAGTCAAAATTTTAGAGAAGTTTGTTTTATTTCTACTTATGATAATCTTTTAATAAATATTATTAATGATCATGTATCACCTTTTGACTTTATTTTAAAGAATAATGGAATCAATTACGTTACCAAAAAGATTCAAGAGAATATTGACTGGGCTTATTTAAAATATAAAGATTTAATTACTAAATCTAATCAAGAATTATTTACATATGAGTCTTTCCCCGGATATATTCATCGCATTCCTAGAGATAACATTCTTTTTATATCTACTACTTCTTTGCAACATCGTTTAAGAATAACTTGTAAAGATAACGAAATACTTTTTCAGGGGGAATTAAAAAATATTGATTCCAAAAATAATGCATTCTTTAGAGTAGATAGACAAATTTTAGTAAACTTAAATAATATCGATTATGTCGATTTTCATAAAAGAAAAATCTTCTTCAAAAATTCTAAAAACAAAAATTGTAAAATTAGTCTACGTAAAATCCCTCTTCTTAGAAGGCTATTACAAGAAACGTCGTCGCCGGTCACCCATAAGAAACAATGATATTACATTATATCAAGAGTTGAAATTTTGCGTATTTATTTAATGATAGAGCGTAGTAATTCTTCATCCAAAAACCAGCAAGATCTTTAAATTTGCAGAATGATAATTAGGTGAAGCATAGTAGTATCACTAACACAAACAAAGCCCCTTGGCAATCATAGTCGATTGCCAAGGGGCTTTGTTTGTGGGCTACTCTCACGAATT

SEQ ID NO: 34 - DNA, 1547 bp, Bacillus subtilis
  misc_feature 1..1547: note = Description of sequence: 16S rRNA sequence
  source 1..1547: mol_type = genomic DNA
tcggagagtttgatcctggctcaggacgaacgctggcggcgtgcctaatacatgcaagtcgagcggacagatgggagcttgctccctgatgttagcggcggacgggtgagtaacacgtgggtaacctgcctgtaagactgggataactccgggaaaccggggctaataccggatggttgtttgaaccgcatggttcaaacataaaaggtggcttcggctaccacttacagatggacccgcggcgcattagctagttggtgaggtaacggctcaccaaggcaacgatgcgtagccgacctgagagggtgatcggccacactgggactgaggcacggcccagactcctacgggaggcagcagtagggaatcttccgcaatggacgaaagtctgacggagcaacgccgcgtgagtgatgaaggttttcggatcgtaaagctctgttgttagggaagaacaagtaccgttcgaatagggcggtaccttgacggtacctaaccagaaagccacggctaactacgtgccagcagccgcggtaatacgtaggtggcaagcgttgtccggaattattgggcgtaaagggctcgcaggcggtttcttaagtctgatgtgaaagcccccggctcaaccggggagggtcattggaaactggggaacttgagtgcagaagaggagagtggaattccacgtgtagcggtgaaatgcgtagagatgtggaggaacaccagtggcgaaggcgactctctggtctgtaactgacgctgaggagcgaaagcgtggggagcgaacaggattagataccctggtagtccacgccgtaaacgatgagtgctaagtgttagggggtttccgccccttagtgctgcagctaacgcattaagcactccgcctggggagtacggtcgcaagactgaaactcaaaggaattgacgggggcccgcacaagcggtggagcatgtggtttaattcgaagcaacgcgaagaaccttaccaggtcttgacatcctctgacaatcctagagataggacgtccccttcgggggcagagtgacaggtggtgcatggttgtcgtcagctcgtgtcgtgagatgttgggttaagtcccgcaacgagcgcaacccttgatcttagttgccagcattcagttgggcactctaaggtgactgccggtgacaaaccggaggaaggtggggatgacgtcaaatcatcatgccccttatgacctgggctacacacgtgctacaatggacagaacaaagggcagcgaaaccgcgaggttaagccaatcccacaaatctgttctcagttcggatcgcagtctgcaactcgactgcgtgaagctggaatcgctagtaatcgcggatcagcatgccgcggtgaatacgttcccgggccttgtacacaccgcccgtcacaccacgagagtttgtaacacccgaagtcggtgaggtaaccttttaggagccagccgccgaaggtgggacagatgattggggtgaagtcgtaacaaggtagccgtatcggaaggtgcggctggatcacctccttt

SEQ ID NO: 35 - DNA, 20 bp, Bacillus subtilis
  misc_feature 1..20: note = Description of sequence: primer 515F
  source 1..20: mol_type = other DNA
gtggccagcmgccgcggtaa

SEQ ID NO: 36 - DNA, 20 bp, Bacillus subtilis
  misc_feature 1..20: note = Description of sequence: Primer 806R
  source 1..20: mol_type = other DNA
ggactachvhhhtwtctaat

SEQ ID NO: 37 - DNA, 1005 bp, Bacillus subtilis
  misc_feature 1..1005: note = Description of sequence: ComKComS expression cassette
  source 1..1005: mol_type = genomic DNA
agcgatatccacttcatccactccatttgtttaatctttaaattaagtataaacatagtacatagcgaatcttccctttattatatctaatgtgttcataaaaaactaaaaaaaatattgaaaatactgatgaggttatataagatgaaagtaagttagtttgtttaaacaacaaactaataggtaacttacaatatgaaataaaatgcatttgtatttgaatgatcaggttttgaatttatttttaagggggaaatcacatgagtcagaaaacagacgcacctttagaatcgtatgaagtgaacggcgcaacaattgccgtgctgccagaagaaatagacggcaaaatctgttccagaattattgaaaaagattgcgtgttttatgtaaacatgaagccgctgcaaattgtcgacagaagctgccgattttttggatcaagctatgcgggaagaaaagcaggaacttatgaagtgacaaaaatttcacacaagccgccgatcatggtggacccttcgaaccaaatctttttattccctacactttcttcgacaagaccccaatgcggctggatttcccatgtgcatgtaaaagaattcaaagcgactgaattcgacgatacggaagtgacgttttcgaatgggaaaacgatggagctgccgatctcttataattcgttcgagaaccaggtatatcgaacagcgtggctcagaaccaaattccaagacagaatcgaccaccgcgtgccgaaaaggcaggaatttatgctgtacccgaaggaagagcggacgaagatgatttatgattttattttgcgtgagctcggggaacggtattagaatttatttttaagggggaaatcacttgaaccgatcaggcaagcatcttatcagcagcattatcctgtatccccggcccagcggagaatgtatatcctcaatcagcttggacaagcaaacacaagctacaacgtccccgctgtacttctgctggagggagaagtag

SEQ ID NO: 38 - DNA, 579 bp, Bacillus subtilis
  misc_feature 1..579: note = Description of sequence: ComK encoding sequence
  source 1..579: mol_type = genomic DNA
atgagtcagaaaacagacgcacctttagaatcgtatgaagtgaacggcgcaacaattgccgtgctgccagaagaaatagacggcaaaatctgttccagaattattgaaaaagattgcgtgttttatgtaaacatgaagccgctgcaaattgtcgacagaagctgccgattttttggatcaagctatgcgggaagaaaagcaggaacttatgaagtgacaaaaatttcacacaagccgccgatcatggtggacccttcgaaccaaatctttttattccctacactttcttcgacaagaccccaatgcggctggatttcccatgtgcatgtaaaagaattcaaagcgactgaattcgacgatacggaagtgacgttttcgaatgggaaaacgatggagctgccgatctcttataattcgttcgagaaccaggtatatcgaacagcgtggctcagaaccaaattccaagacagaatcgaccaccgcgtgccgaaaaggcaggaatttatgctgtacccgaaggaagagcggacgaagatgatttatgattttattttgcgtgagctcggggaacggtattag

SEQ ID NO: 39 - DNA, 141 bp, Bacillus subtilis
  misc_feature 1..141: note = Description of sequence: ComS encoding sequence
  source 1..141: mol_type = genomic DNA
ttgaaccgatcaggcaagcatcttatcagcagcattatcctgtatccccggcccagcggagaatgtatatcctcaatcagcttggacaagcaaacacaagctacaacgtccccgctgtacttctgctggagggagaagtag

SEQ ID NO: 40 - DNA, 260 bp, Bacillus subtilis
  misc_feature 1..260: note = Description of sequence: "Sequence of PxylA_Bs105 a xylose inducible promoter"
  source 1..260: mol_type = genomic DNA
agcgatatccacttcatccactccatttgtttaatctttaaattaagtataaacatagtacatagcgaatcttccctttattatatctaatgtgttcataaaaaactaaaaaaaatattgaaaatactgatgaggttatataagatgaaagtaagttagtttgtttaaacaacaaactaataggtaacttacaatatgaaataaaatgcatttgtatttgaatgatcaggttttgaatttatttttaagggggaaatcac

SEQ ID NO: 41 - DNA, 149 bp, Bacillus subtilis
  misc_feature 1..149: note = Description of sequence: mannose inducible promoter from B. subtilis strain 105
  source 1..149: mol_type = genomic DNA
aagcagggattattccttgcttttttttgttatagggaaaaatgcctttattaccggaacctatggtaaaaaaaagcgattttaatgagctgatttcggtatacagttgagacaagatcttataattcacactttaaaggagggttcct

SEQ ID NO: 42 - protein, 93 aa, Bacillus subtilis
  REGION 1..93: note = Description of sequence: Bacillus subtilis strain 105 beta mannanase secretion signal
TTGTTTAAGAAACATACGATCTCTTTGCTCATTATATTTTTACTTGCGTCTGCTGTTTTAGCAAAACCAATTGAAGCGCATACTGTGTCGCCT

SEQ ID NO: 43 - protein, 31 aa, Bacillus subtilis
  REGION 1..31: note = Description of sequence: beta mannanase secretion signal peptide
LFKKHTISLLIIFLLASAVLAKPIEAHTVSP

SEQ ID NO: 44 - protein, 26 aa, Bacillus subtilis
  REGION 1..26: note = Description of sequence: beta mannanase secretion signal peptide
LFKKHTISLLIIFLLASAVLAKPIEA

SEQ ID NO: 45 - protein, 78 aa, Bacillus subtilis
  REGION 1..78: note = Description of sequence: Bacillus subtilis strain105 pel secretion signal
ATGAAAAAAGTGATGTTAGCTACGGCTCTGTTTTTAGGATTGACTCCAGCTGGCGCGAACGCAGCTGATTTAGGCCAC

SEQ ID NO: 46 - protein, 26 aa, Bacillus subtilis
  REGION 1..26: note = Description of sequence: Pel secretion signal peptide
MKKVMLATALFLGLTPAGANAADLGH

SEQ ID NO: 47 - protein, 21 aa, Bacillus subtilis
  REGION 1..21: note = Description of sequence: Pel secretion signal peptide
MKKVMLATALFLGLTPAGANA

SEQ ID NO: 48 - DNA, 87 bp, Bacillus subtilis
  misc_feature 1..87: note = Description of sequence: Bacillus subtilis strain 105 dacC secretion signal
  source 1..87: mol_type = genomic DNA
atgaaaaaaagcataaagctttatgttgctgttttactgcttttcgtcgttgcttcggtgccttatatgcatcaggctgcgcttgcc

SEQ ID NO: 49 - protein, 29 aa, Bacillus subtilis
  REGION 1..29: note = Description of sequence: dacC secretion signal peptide
MKKSIKLYVAVLLLFVVASVPYMHQAALA

SEQ ID NO: 50 - protein, 30 aa, Bacillus subtilis
  REGION 1..30: note = Description of sequence: yvcE signal peptide
MRKSLITLGLASVIGTSSFLIPFTSKTASA

SEQ ID NO: 51 - protein, 25 aa, Bacillus subtilis
  REGION 1..25: note = Description of sequence: yoqM signal peptide
MKLRKVLTGSVLSLGLLVSASPAFA

SEQ ID NO: 52 - protein, 30 aa, Bacillus subtilis
  REGION 1..30: note = Description of sequence: yuaB signal peptide
MKRKLLSSLAISALSLGLLVSAPTASFAAE

SEQ ID NO: 53 - protein, 21 aa, Bacillus subtilis
  REGION 1..21: note = Description of sequence: Pel signal peptide
MKKVMLATALFLGLTPAGANA

SEQ ID NO: 54 - protein, 24 aa, Bacillus subtilis
  REGION 1..24: note = Description of sequence: pelB signal peptide
MKRLCLWFTVFSLFLVLLPGKALG

SEQ ID NO: 55 - protein, 24 aa, Bacillus subtilis
  REGION 1..24: note = Description of sequence: yoaW signal peptide
MKKMLMLAFTFLLALTIHVGEASA

SEQ ID NO: 56 - protein, 28 aa, Bacillus subtilis
  REGION 1..28: note = Description of sequence: yqxI signal peptide
MFKKLLLATSALTFSLSLVLPLDGHAKA

SEQ ID NO: 57 - protein, 32 aa, Bacillus subtilis
  REGION 1..32: note = Description of sequence: lipA signal peptide
MKFVKRRIIALVTILMLSVTSLFALQPSAKAA

SEQ ID NO: 58 - protein, 28 aa, Bacillus subtilis
  REGION 1..28: note = Description of sequence: lipB signal peptide
MKKVLMAFIICLSLILSVLAAPPSGAKA

SEQ ID NO: 59 - protein, 23 aa, Bacillus subtilis
  REGION 1..23: note = Description of sequence: yoqH signal peptide
MKRFILVLSFLSIIVAYPIQTNA

SEQ ID NO: 60 - protein, 28 aa, Bacillus subtilis
  REGION 1..28: note = Description of sequence: ybfO 2 signal peptide
MKRMIVRMTLPLLIVCLAFSSFSASARA

SEQ ID NO: 61 - protein, 28 aa, Bacillus subtilis
  REGION 1..28: note = Description of sequence: sacB signal peptide
MNIKKFAKQTVLTFTTALLAGGATQAFA

SEQ ID NO: 62 - protein, 28 aa, Bacillus subtilis
  REGION 1..28: note = Description of sequence: bglS signal peptide
MPYLKRVLLLLVTGLFMSLFAVTATASA

SEQ ID NO: 63 - protein, 28 aa, Bacillus subtilis
  REGION 1..28: note = Description of sequence: yddT signal peptide
MRKKRVITCVMAASLTLGSLLPAGYASA

SEQ ID NO: 64 - protein, 25 aa, Bacillus subtilis
  REGION 1..25: note = Description of sequence: yobB signal peptide
MKIRKILLSSALSFGMLISAVPALA

SEQ ID NO: 65 - DNA, 2360 bp, Bacillus subtilis
  misc_feature 1..2360: note = Description of sequence: Spo0A and SpoIVB sequence B. subtilis #105
  source 1..2360: mol_type = genomic DNA
ttaagaagccttatgttctaatctcagcttatccgcaaccattgcaatgaattccgaatttgtcggtttagcttttgtcatgctgacagtataaccgaacaacgaggaaatggaatcaatgtttcctctgctccatgccacttcaattgcatggcggatcgctctttctacacggcttgcggttgtgttgaattttttggcgatgtccggatagaggacttttgtaatgctgccgagcaattcgatgtcattgtataccattgagattgcttcgcgcagatagagatagcctttaatatgggctgggacgccgatttcatggataatgcttgtgatgctcgcgtcgagatttttcttctttggttcaggctggctgctgcgtataatactgctttgcgatgatggcgcacgatgcgtcacactgctggcatttccgctgacctggcggatatggccgacaaggttttccatatcaaacggtttgagaataaagtaggacgcgcctaaatcgacggcctttttcgtgacatcttcctgtccaaaggctgtcagcataatgacattcggctgttttttcagatctgattccctcagcctctctaaaaccgcaagtccgtctaaatgcggcataataatatctaatacgagcacatcgggatctttttctttaaacagcgacaggcattcctgtccgttataagcaacgccgatcacttccatgtcttcctgtccttctatatattcacttaacaggcttaccagctctcgattatcatcagcaacacaaactttaattttctccacgtttcttcctccccaaatgtagttaacaggattcacccttgctacatgtttacattcgacaaaaccgctatataccctctaaaaaaatcataatcaccaatattagtggcatatctttgttattctatgtttttctctgtttttcgactaaaaatgaaatttgacaaacaaggaaacgtgaatttgtcgaaaaatcttcttttgtatattttaccgtatgtattctgagaagtgaagagggatcaaaataaaaaaactgccggaaactccggcagtcagcttgctttttcttttccataaatatcgattcctgcttctgacagcatccattcaatatgaacaccgtagccgcttgtcgggtcatttacaaatacatgggtgacagcaccgatcacttttccattttgaatgatcgggcttccgctcatcccctgtacgatgcctcctgtttctttcaacagtcttggatcggtaattttcaacaccattccttttgtcgcagggaatttttgcggcgttgtgctgacgatttcaatatcgaatttttctactttgtcatcatcaataacggttaaaatttcagccggcccttttttgacttcggtagaaaacgcaaccggcaatgcttgatctgatatgttgttttgaatcggctgatgcagtgtgccgaaaatcccaaacgggctgtttctgttaatatccccgatcgttttgcgttctgaggaaaatcgcgccagtttttctcccggattaccgcctgtccctttttcaattgatgttacagtggatttaacgatttctccattctccactacaattggtttctttgtgtccatatcggaaatcacgtggccaagtgctccgtatttttttgttttcggttcataaaaggtcatagtgccgatgccggcagcagaatctctgatatataacccgattctgtatttgccttctccttcatccttttctgggatcagcttcgttttgattttctgtttatcacgtttgatcagtaagtctaaagattcaccagttttcccagccttttgaataaatggggctacatcattcattttttcaattttctgtccattcatctcaataatgatgtcgcccgcctcaattcctgccgtttctcccggagattttttgccttcacttgtattgatttgatgaaatccgacgacaagaacaccgacggaatgaagttttacaccgattgattgtccgccaggtataacttttaaatcaggaagaacatgcacttttgtttttttaattggaaatccggcaagatcatataccaattctgactcacctgattttttgcccgtcaccttgatttcatgcggatctttctttactgtaaacgcttctgaggattctgatgtctgagcgtttaccgataaactcgtttcaatcgcttgtgtttgggtttcaaatactctcatttgcgttggaatcagtaaatattcttttagcggtttgcataaacctacacttaataacgaaacaaggagaattaaacctactgcttttctgatgttatcgggcat

SEQ ID NO: 66 - DNA, 172 bp, Bacillus subtilis
  misc_feature 1..172: note = Description of sequence: tuf promoter
  source 1..172: mol_type = genomic DNA
aagtgccgaagagcgtcgcagaagaaattatcaaaaaaaataaaggcgaataattgattttgccgcttaactcaagtataactactattgtaagatgaggaagtgaaagctttctttcacttcctatcactctatacattactaattaaaagctcttaaggaggattttaga

SEQ ID NO: 67 - DNA, 202 bp, Bacillus subtilis
  misc_feature 1..202: note = Description of sequence: SigX promoter
  source 1..202: mol_type = genomic DNA
atcgagtctgaatttgccgaagaatcttgttccataagaaacacccgctgactgagcgggtgtttttttaatagccaacattaataaaatttaaggatatgttaatataaattcccttccaaattccagttactcgtaatatagttgtaatgtaacttttcaagctattcatacgacaaaaaagtgaacggaggggtttcaa

SEQ ID NO: 68 - DNA, 238 bp, Bacillus subtilis
  misc_feature 1..238: note = Description of sequence: groS promoter
  source 1..238: mol_type = genomic DNA
atggtatgtactcctttgttaagtgggtttcgttcatctacagctattgtaacataatcggtacgggggtgaaaaagctaacggaaaagcgagcggaaaagaatgatgtaagcgtgaaaaaatttttatcttatcacttgaaattggaagggagattctttattataagaattgtgttagcactctttagtgctgagtgctaaaattacatattcatactattgaggaggttattaca

SEQ ID NO: 69 - DNA, 97 bp, Bacillus subtilis
  misc_feature 1..97: note = Description of sequence: ftsH promoter
  source 1..97: mol_type = genomic DNA
tcggcagcctgcttccgagatggttattgtttgtattggaatgattttctatggtactattgaacatagttgtgcttactgtgggaggaggtaagga

SEQ ID NO: 70 - DNA, 1566 bp, Bacillus subtilis
  misc_feature 1..1566: note = Description of sequence: nprE encoding sequence
  source 1..1566: mol_type = genomic DNA
gtgggtttaggtaagaaattgtctgttgctgtcgctgcttcgtttatgagtttatcaatcagcctgccaggtgttcaggctgctgaaggtcatcagcttaaagagaatcaaacaaatttcctctccaaaaatgcgattgcgcaatcagaactctctgcaccaaatgacaaggctgtcaagcagtttttgaaaaagaacagcaacatttttaaaggtgatccttccaaaaggctgaagcttgttgaaagcacgactgatgcccttggatacaagcactttcgatatgcgcctgtcgttaacggagtgccaattaaagattcgcaagtgatcgttcacgtcgataaatccgataatgtctatgcggtcaatggtgaattacacaatcaatctgctgcaaaaacagataacagccaaaaagtctcttctgaaaaagcgctggcactcgctttcaaagctatcggcaaatcaccagacgctgtttctaacggagcggccaaaaacagcaataaagccgaattgaaagccatagaaacaaaagacggcagctatcgtcttgcttacgacgtgacgattcgctatgtcgagcctgaacctgcaaactgggaagtcttagttgacgccgaaacaggcagcattttaaaacagcaaaataaagtagaacatgccgccgccactggaagcggaacaactctaaagggcgcaactgttcctttgaacatctcttatgaaggcggaaaatatgttctaagagatctttcaaaaccaacaggcacccaaatcatcacatatgatttgcaaaacagacaaagccgccttccgggaacgcttgtctcaagcacaacgaaaacatttacatcttcatcacagcgggcagccgttgacgcacactataacctcggtaaagtgtacgattatttttattcaaactttaaacgaaacagctatgataacaaaggcagtaaaatcgtttcttccgttcactatggcactcaatacaataacgctgcatggacaggagaccagatgatttacggtgatggcgacggttcattcttctctccgctttccggctcattagatgtgacagcgcatgaaatgacacatggcgtcacccaagaaacagccaacttgatttatgaaaatcagccaggtgcattaaacgagtctttctctgacgtattcgggtattttaacgatacagaagactgggacatcggtgaagacattacggtcagccagcctgctcttcgcagcctgtccaaccctacaaaatacaaccagcctgacaattacgccaattaccgaaaccttccaaacacagatgaaggcgattatggcggtgtacacacaaacagcggaattccaaacaaagccgcttacaacaccatcacaaaacttggtgtatctaaatcacagcaaatctattaccgtgcgttaacaacgtacctcacgccttcttccacgttcaaagatgccaaggcagctctcattcagtctgcccgtgacctctacggctcaactgatgccgctaaagttgaagcagcctggaatgctgttggattgtaa

SEQ ID NO: 71 - protein, 521 aa, Bacillus subtilis
  REGION 1..521: note = Description of sequence: nprE
VGLGKKLSVAVAASFMSLSISLPGVQAAEGHQLKENQTNFLSKNAIAQSELSAPNDKAVKQFLKKNSNIFKGDPSKRLKLVESTTDALGYKHFRYAPVVNGVPIKDSQVIVHVDKSDNVYAVNGELHNQSAAKTDNSQKVSSEKALALAFKAIGKSPDAVSNGAAKNSNKAELKAIETKDGSYRLAYDVTIRYVEPEPANWEVLVDAETGSILKQQNKVEHAAATGSGTTLKGATVPLNISYEGGKYVLRDLSKPTGTQIITYDLQNRQSRLPGTLVSSTTKTFTSSSQRAAVDAHYNLGKVYDYFYSNFKRNSYDNKGSKIVSSVHYGTQYNNAAWTGDQMIYGDGDGSFFSPLSGSLDVTAHEMTHGVTQETANLIYENQPGALNESFSDVFGYFNDTEDWDIGEDITVSQPALRSLSNPTKYNQPDNYANYRNLPNTDEGDYGGVHTNSGIPNKAAYNTITKLGVSKSQQIYYRALTTYLTPSSTFKDAKAALIQSARDLYGSTDAAKVEAAWNAVGL

SEQ ID NO: 72 - DNA, 4302 bp, Bacillus subtilis
  misc_feature 1..4302: note = Description of sequence: bpr encoding sequence
  source 1..4302: mol_type = genomic DNA
atgaagaaaaaaacgaaaaacagactcatcagctctgttttaagtacagttgtcatcagttcactgctgtttccgggagcagccggggcaagcagtaaagtcacctcaccttctgttaaaaaggagcttcaatctgcggaatccattcaaaacaagatttcgagttcattaaagaaaagctttaaaaagaaagaaaaaacgacttttctgattaaatttaaagatcaggctaacacagaaaaagcggcaaaagcggctgttaaaaaagcgaaatcgaagaagctgtctgccgctaagacggaatatcaaaagcgttctgctgttgtgtcatctttaaaagtcacagccgatgaatcccagcaagatgtcctaaaatatttgaacgcccagaaagataaaggaaatgcagaccaaattcattcttattatgtggtgaacgggattgctgttcatgcctcaaaagaggttatggaaaaagtggcgcagtttcccgaagtggaaaaggtgcttcctaatgagaaacggcagctttttaagtcatcctccccatttaatatgaaaaaagcacagaaagctattaaagcaactgacggtgtggaatggaatgtagaccaaatcgatgctccaaaagcttgggcacttggatatgatggaactggcacggttgttgcgtccattgataccggggtggaatggaatcatccggcattaaaagagaaatatcgcggatataatccggaaaatcctaatgagcctgaaaatgaaatgaactggtatgatgccgtagcaggcgaggcaagcccttatgatgatttggctcatggaacccatgtgacaggcacgatggtgggctctgaacctgatggaacaaatcaaatcggtgtagcgcctggcgcaaaatggattgctgttaaagcgttctctgaagatggcggcactgatgctgacattttggaagctggtgaatgggttttagcaccaaaggacgcggaaggaaatccccacccggaaatggctcctgatgttgtcaataactcatggggagggggctctggacttgatgaatggtacagagacatggtcaacgcctggcgtgcggccgatattttccctgagttttcagcggggaatacggatctctttattcccggcgggcctggttctatcgcaaatccggcaaactatccagaatcgtttgcaactggagcgactgatatcaataaaaagctcgctgacttttctcttcaagggccatctccatatgatgagataaagccggaaatatctgcaccgggcgttaatattcgttcatccgttcccggtcagacatatgaggatggttgggacggcacatcaatggcagggccgcatgtatccgctgttgctgcactgctgaaacaggcgaatgcctcactttctgttgatgagatggaggatatattaaccagcacggctgaaccgctcacggattcaacatttcctgattcaccgaataacggatatggccatggtctggtgaatgcttttgatgctgtatccgctgttacagatggtttagggaaagcggaaggacaagtttctgtagagggggatgaccaagagcctcctgtctatcagcatgagaaagtaactgaagcttatgaaggtggtagcctgccactgactttgacagctgaagacaatgtgagtgtgacatctgtaaagctgtcctacaagcttgatcaaggtgaatggacagaaataacggctaaacgaatcagcggtgatcatctaaaaggaacgtatcaggcagagatcccagatataaaaggaactaaactaagctataagtggatgattcacgattttggcggtcatgtcgtttcgtctgacgtatacgatgtaacagtgaaaccaagcatcacggcgggatataagcaggactttgaaactgcacccggcggctgggttgcgagcggaacaaataataactgggaatggggagttccgtcaactggcccaaatacagcagcatccggagaaaaagtatatggaacgaatttgacaggaaattatgccaactcagcaaacatgaaccttgttatgcctcctattaaagcacctgattcaggaagtctgttccttcaatttaaaagctggcacaatttagaggatgattttgattacggctacgtttttgttcttccggaaggtgaaaagaattgggagcaggctggtgtctataacggaaagacatcaagctggacggacgaagaaattgatttatcggcttataaaggccaaaacattcaagtgatgtttaaccttcaatctgatgaaagcattgcaaaagagggctggtatattgatgatgtagtgctttctgacaaatcagccggaaaaacagtcaaaaagaataagctgggcgtcgaaaagccgtctggaaagcaaaagaaaaagccagtaaatccgaaaaaggctaagccatctgcaaacacagcggtaaaacatcagaacaaggctatacagcctcaagttttgccgctcagggcacaagtcagtgtagtggaaacaggaaaatcaacatattcagatcaatccacagggcagtacacgctgaagcacaaagcgggagactatacgcttatggcagaagcatatggttatcagtcgaaaacacaaaaagtatctttaaagacggatcagacgacacaagctaattttacgttagaagagatgaagaagggcacattaaaaggcatggtcatcaataaaacgacaggagagccggtaacaggcgcttccgtttatgttgtagaggatgctgctgtggaaccggctatgacaaacgacaaaggtgaatatacgctggaggcctatgaaggcgcttatacgattaaagtcgctgcaccgggttattacagtgatgaattttccgttgagttaaaaggtgatgttacaaaagaaactgcattgaagcctttcgtcggttatccgggtgaaattgcatatgatgacggaacagcggagaatgccaattcctattttgctgccggtaacggatgggcggtaaaaatgacgctcgctgacggcaaggacaaaggcatgcttacaggagggctgttcagattctgggatacagagttcccagatccgggcggcacagagtttaaggttgaggtatacgatgccacaggaaaagacggagcaccgggcaagaaaattgcagggccatttaacgctgaagctcttcgcaatggcgagtggactaaggtagatctcagttcaaaagggattatggtcgatagagacttttatctcgtatatatccagtcaaaacctgacccgtattcacctggactggcaatggatgaaaccggcaagaattccggccgcaactggcagtatataggtggacaatgggagccgggtgacgaagcagacggcaactatatgattcgcgcattagttaattatgaagctgctgtacctgagattacttcaccgacagacaaatcatacacaaataaggatagcgtcactgtaaaaggaaacgcttctcctggcacaacggtacacatttataatggagagaaagaagcaggagaaacgaaagctgctgcggatggcacgttccatgcaggcatcatactcaacaagggtgaaaatgagctgacggcaactgcatcaactgacaacggaacaacagatgcctccagcccaatcacggtcacgcttgatcaagaaaagcctgaattaacactggacaatccaaaggatggcgggaaaacaaataaagaaacgctgactgtcaaaggggctgtatccgatgacaatctgaaagacgtcaaggtgaatggcaaaaaagcaacagtagctgatggttcatactcagcccgtattcttttggaaaatggaagaaatgaaatcaaggtaattgctacagacttggcaggcaacaaaacgacgaaaaagacagtcattgatgtgaactttgacaagcctgtcatttccggcttaattccgggagaggataaaaacttaaaagccggtgaatctgtgaaaatcgctttctcaagcgctgaggatttagatgcaacgtttaccattcgtatgccgctgacgaatgcaagagcgagtgtgcaaaatgccaccgaactcccgttaagagaaatctctccggggagatatgaaggctattggactgccacttcttctattaaagcaaaaggagcaaaagtagaagtgatcgtccgagatgattatggaaatgaaacaagaaaaactgcgaatggaaaacttaatatcaacacagaaaattaa

SEQ ID NO: 73 - DNA, 2421 bp, Bacillus subtilis
  misc_feature 1..2421: note = Description of sequence: vpr encoding sequence
  source 1..2421: mol_type = genomic DNA
ttgaaaaaggggatcattcgctttctgcttgtaagtttcgtcttattttttgcgttatccacaggtattacgggcgtccaggcagctccggcttcttcaaaaacgtcggctgatctggaaaaagccgaggtattcggtgatatcgacatgacgacaagcaaaaaaacaaccgttatagtggaattaaaagaaaaatccttggcagaagcgaaggaagcgggagaaagccaatcgaaaagcaagctgaaaaccgctcgcaccaaagcaaaaaataaagcaatcaaagcggtgaaaaacggaaaagtaaaccgggaatatgagcaggtattctcaggcttctctatgaagcttccagctaatgagattccaaaacttctcgcggtaaaagacgttaaggcggtgtacccgaacgtcacatataaaacagacaatatgaaggataaagacgtcacaatctccgaagacgccgtatctccgcaaatggatgacagtgcgccttatatcggagcaaacgatgcatgggatttaggctacacaggaaaaggcattaaggtggcgattattgacactggggttgaatacaatcacccagatctgaagaaaaactttggacaatataaaggatacgattttgtggacaatgattacgatccaaaagaaacaccaaccggcgatccgaggggcgaggcaactgaccatggcacacacgtagccggaactgtggctgcaaacggaacaattaaaggcgtagcgcctgatgccacacttcttgcttatcgtgtgttagggcctggcggaagcggcacaacggaaaacgtcatcgcgggcgtggaacgtgcagtgcaggacggggcagatgtgatgaacctgtctctcggaaactctttaaacaacccggactgggcgacaagcacagcgcttgactgggccatgtcagaaggcgttgtcgctgttacctcaaacggcaacagcggaccgaacggctggacagtcggatcgccgggcacatcaagagaagcgatttctgtcggtgcgactcagctgccgctcaatgaatacgccgtcactttcggctcctattcttcagcaaaagtgatgggctataacaaagaggacgacgtcaaagcgctcaataacaaagaagttgagcttgtcgaagcgggaatcggcgaagaaaaggattttcaagggaaagacctgacaggcaaagtcgccgttgtcaaacgaggtagcattgcatttgtggataaagcggataacgctaaaaaagccggtgcaatcggcatggttgtgtataacaacctctctggagaaattgaagccaatgtgccaggcatgtctgtcccaacgattaagctttcattagaagacggcgaaaaactcgtcagcgccctgaaagctggtgagacaaaaacaacattcaagttgacggtctcaaaagcgctcggtgaacaagtggctgatttctcatcacgcggccctgttatggatacgtggatgattaagcctgatatttccgcgccaggggtcaatatcgtgagcacgatcccaacacacgatcctgaccatccatacggctacggatcaaaacaaggaacaagcatggcatcgcctcatattgccggagcggttgccgttattaaacaagccaagccaaagtggagcgttgaacagattaaaaccgccatcatgaataccgctgtcactttaaaggatagcgatggggaagtatatccgcataacgctcaaggcgcaggcagcgcaagaatcatgaacgcaatcaaagcagattcgctcgtctcacctggaagctattcatacggcacgttcttgaaggaaaacggaaacgaaacgaaaaaagaaacgtttacgattgaaaatcaatcttccattagaaaatcatacacactggaatactcatttaatggcagcggcatctccacatccggcacaagccgtgttgtgattccggcacatcaaaccgggaaagccactgcaaaagtaaaggtcaatacgaagaaaacaaaagctggcacctatgaaggaacggttatcgtcagagaaggcggaaaaacggtcgctaaggtacctacattgctgattgtgaaagagcccgattatccgagagtcacatctgtctctgtcagcgaagggtctgtacaaggtacctatcaaattgaaacctaccttcctgcgggagcggaagagctagcgttcctcgtctatgacagcaaccttgatttcgcaggccaagccggcatttataaaaaccaagataaaggttaccagtactttgactgggacggcacgattaatggcggaaccaaacttccggccggagagtattacttgctcgcatatgccggaaacaaaggcaagtcaagccaggttttgaccgaagaacctttcactgttgaataa

SEQ ID NO: 74 - protein, 806 aa, Bacillus subtilis
  REGION 1..806: note = Description of sequence: vpr
LKKGIIRFLLVSFVLFFALSTGITGVQAAPASSKTSADLEKAEVFGDIDMTTSKKTTVIVELKEKSLAEAKEAGESQSKSKLKTARTKAKNKAIKAVKNGKVNREYEQVFSGFSMKLPANEIPKLLAVKDVKAVYPNVTYKTDNMKDKDVTISEDAVSPQMDDSAPYIGANDAWDLGYTGKGIKVAIIDTGVEYNHPDLKKNFGQYKGYDFVDNDYDPKETPTGDPRGEATDHGTHVAGTVAANGTIKGVAPDATLLAYRVLGPGGSGTTENVIAGVERAVQDGADVMNLSLGNSLNNPDWATSTALDWAMSEGVVAVTSNGNSGPNGWTVGSPGTSREAISVGATQLPLNEYAVTFGSYSSAKVMGYNKEDDVKALNNKEVELVEAGIGEEKDFQGKDLTGKVAVVKRGSIAFVDKADNAKKAGAIGMVVYNNLSGEIEANVPGMSVPTIKLSLEDGEKLVSALKAGETKTTFKLTVSKALGEQVADFSSRGPVMDTWMIKPDISAPGVNIVSTIPTHDPDHPYGYGSKQGTSMASPHIAGAVAVIKQAKPKWSVEQIKTAIMNTAVTLKDSDGEVYPHNAQGAGSARIMNAIKADSLVSPGSYSYGTFLKENGNETKKETFTIENQSSIRKSYTLEYSFNGSGISTSGTSRVVIPAHQTGKATAKVKVNTKKTKAGTYEGTVIVREGGKTVAKVPTLLIVKEPDYPRVTSVSVSEGSVQGTYQIETYLPAGAEELAFLVYDSNLDFAGQAGIYKNQDKGYQYFDWDGTINGGTKLPAGEYYLLAYAGNKGKSSQVLTEEPFTVE

SEQ ID NO: 75 - DNA, 696 bp, Bacillus subtilis
  misc_feature 1..696: note = Description of sequence: epr1 encoding sequence
  source 1..696: mol_type = genomic DNA
atgaaaaacatgtcttgcaaacttgttgtatcagtcactctgtttttcagttttctcgccataggccctctcgctcatgcgcaaaacagcagcgagaaagaggttattgtggtttataaaaacaaggccggaaaggaaaccatcctggatagtgatgctgatgttgaacagcagtataagcatcttcccgcggtagcggtcacagcagaccaggagacagtaaaagaattaaagcaggatcctgatattttgtatgtagaaaacaacgtatcatttaccgcagcagacagcacggatttcaaagtgctgtcagacggcactgacacctctgacaactttgagcaatggaaccttgagcccattcaggtgaaacaggcttggaaggcaggactgacaggaaaaaatatcaaaattgccgtcattgacagcgggatctccccccacgatgacctgtcgattgccggcgggtattcagctgtcagttatacctcttcttacaaagatgataacggccacggaacacatgtcgcagggattatcggagccaagcataacggctacggaattgacggcatcgcaccggaagcacaaatatacgcggttaaagcgcttgatcagaacggctcggggatcttcaaagtcttctccaaggaattgactggtcgatcgcaaacgggatggacatcgtcaatatga

SEQ ID NO: 76 - DNA, 1245 bp, Bacillus subtilis
  misc_feature 1..1245: note = Description of sequence: epr2 encoding sequence
  source 1..1245: mol_type = genomic DNA
atgagccttggcacgacgtcagacagcaaaatccttcatgaggccgtgaacaaagcatatgaacaaggtgttctgcttgttgccgcaagcggtaacgacggaaacggcaagccagtgaattatccggcggcatacagcagtgtcgttgctgtttcagcaacaaacgaaaagaatcagcttgcctccttctcaacaactggagatgaagttgaattttcagcgccggggacaaacatcacaagcacttacttaaaccagtattatgcaacaggaagcggaacatcccaagcgacaccgcacgccgctgccatgtttgctttgttaaaacagcgtgatcctgccgagacaaacgtccagcttcgcgaggaaatgcggagaaatatcgttgatcttggtaccgcaggccgcgatcagcaatttggctacggcttaatccaatataaagcacaggtaacagattcagcgtacgcggcagcagagcaagcggtgaaaaaagcggaacaaacaaaagcacaaaccgaaatcaacaaagcgcgagaactcatcagccagctgccgggctccgacgccaaaactgccctgcaaaaaagactggataaagtacagtcatacagaaatgtaaaagatgcgaaagacaaagtcgcaaaggcagaaaaatataaaacacagcaaaccgttgatacagcacaaactgccatcaacaagctgccaaacggaacagacaaaaagaaccttcaaaaacgcttagaccaagtaaaacgctacatcgcgtcaaagcaagcgaaagacaaagttgcgaaagcggaaaaaagcaaaaagaaaacagatgtggacagcgcacaatcagcaattggcaagctgcctgcaagttcagaaaaaacgtccctgcaaaaacgccttaacaaagtgaagagcaccaatttgaagacggcacagcaatccgtatctgcggctgaaaagaaatcaactgatgcaaatgcggcaaaagcacaatcagccgtcaatcagcttcaagcaggcaaggacaaaacggcattgcaaaaacgattagacaaggtgaagaaaaaggtggcggcggctgaagcaaaaaaagtcgaaactgccaaggcaaaagtgaagaaagcggaaaaagacaaaacaaagaaatcaaagacatccgctcagtctgcagtgaatcaattaaaagcatcccatgaaaaaacaaagctgcaaaaacggctgaacgccgtcaaaccgaaaaagtaa

SEQ ID NO: 77 - DNA, 2685 bp, Bacillus subtilis
  misc_feature 1..2685: note = Description of sequence: wprA encoding sequence
  source 1..2685: mol_type = genomic DNA
atgaaacgcagaaaattcagctcggttgtggcggcagtgcttatttttgcactgattttcagccttttttctccgggaaccaaagctgcagcggccggcgcgatcgatcaggcggctgctctggaaaacggcaaagagcagacaggcgccatgaaggagccggaacaggtgaaatggtacaaagtgaccccgggagcaacggatattcagaaaaactcacatatggcactgaccgtaaagagtgattcagtactgaatgtatctgtatatccaagtaaggaaaaagcgcttaaagatgagacgtttgagatgtaccgttctttcacagcggaggatggaaaaagcgaagtcatttttccatacgcgtggagcggcccttactatgtaaaagttgaatacctcggagaagaagagccagaggacggcggaacggcagaagcagctgcagaagccaagtatacgattgggtataaaggcaccaaaaaacagccgtcagatttagaagaggaagaagcttgtccggttgaaatgagtgtcgatcagaagaaatcaggaaaaggcatcctggataagctgagagcgattcgtgatgagcagctgagccaaacagcagaaggcaaagaactgacaagcctttattacaaagcagcaccgtttatcgttgcaaagctcgcactcaataaaacagcaagaaatgaaatctatcaggatcttgtgacattaaagccgttatttgacgatgtgtcagaaaacggagcatcatcttcgcataaggtcactgaaaaggatcaaaaagcaatcaaccggctatatgataaagctttacaatcagtcccgtcattccttaaagaggagataaagaaacaagcggaccgactaaatatgaagcagctgcaaggcaaaacagccggagccattttaacagaaaaccatattgcagcaaaaagtgaagttcagacaacaaaggttattttcaaggtgaaggacaataaaagcctctcatccgtacataatgaaatgaagggcttttctgcaagcgcgcaatcgaaaaaagacatatccaatgtgaaaaaggcaaagaaactgtttgacaatctgtattcatttgaacttccgaaagatgagaaacagaacggcgcatatacggcaagcgccaaaagggtcaaaagcgctgctgcgacactatccaagatgtccaatgtagagtttgcggaacccgtgcaggaatacaaaagcctggcaaacgacattcagtacccttatcaatggccgcttaaaaacaacggtgaaaacgggggtgtcaaaaatgcggatgtgaaatatgagcctgccaacacattgctgtccaaacgcaagcttaacgatacactcattgcagtagtagacacaggcgtagacagcacgcttgctgatttaaaaggaaaagtaagaacagatctcggacacaattttgtcggacggaataacaatgcaatggatgatcaggggcatgggacgcatgtcgcaggcattattgcggcccaaagcgataacggctattcaatgactggattgaatgccaaagcaaaaatcatcccggtaaaagtgcttgattccgcaggttccggagatactgaacaaattgctctcggcatcaaatatgctgctgacaaaggagcaaaggtgattaatttaagtttaggcggaggctacagccgcgtgcttgaatttgctttgaagtacgcagctgacaaaaatgtcttgattgccgcagccagcgggaatgatggagaaaatgccttatcttatccagcatcttctaaatatgtgatgtcagtcggcgcaacgaaccgcatggatatgaccgctgatttctctaactatggaaaaggtctggacatctctgctccagggtctgatatcccgagcttagtaccgaacggaaatgtcacgtacatgagcggaacgtctatggcgacgccgtatgctgccgctgctgcaggattgctgtttgctcaaaatcctaagctgaaaagaacagaagttgaggatatgttgaaaaagacggcagatgacatttcctttgaaagtgtcgatggcggagaagaagagttgtatgacgattatggcgatccgattgaaattccgaagacacctggtgtagactggcattcaggctacgggcggctgaatgtcatgaaggctgtcagcgcagctgatttacagcttaaggtcaacaagctggaaagcactcaaacagctgtcagaggaaacgcgaaggaaggcacacttatcgaggtgatgaacggcaaaaagaaactcggcagcgccaaagccggaaaagacaatgcgttcaaggtcaatatcgcgactcaaaaacaggatcaagtactgtatgtgaaagcaacaaaaggcgatgcgaaaacatcgtataaagttgtcgtcgtcaaaggaaaaccttccggcacaccgaaagtaaacgcggtgaaaacgaaggatacggcagtaaaagggaaggcaaacagcaaagcgatgatcagagtgaaaaacaaatcaaagaaagtcattgcttctgccaaagctgacgcaaaaggaacgttttcggtgaaaatcaaaaaacaaaaagccggaacggtgctgtacgtcacggctgcggatacagataaaaaagaaagcaaggaagcaaaagtggttgttgaaaagtaa

SEQ ID NO: 78 - DNA, 1617 bp, Bacillus subtilis
  misc_feature 1..1617: note = Description of sequence: nprB encoding sequence
  source 1..1617: mol_type = genomic DNA
ttgcgcaacctgaccaagacatctctattactggccggcttatgcacggcggcccaaatggtttttgtaacacatgcctcagctgatcaaagcatcaaatacgaccatacgtatcaaaccccttcatacatcatcgaaaagtcaccgcagaagccggtacaaaacacaacccagaaagaatcgctattttcctatcttgacaagcatcaaacgcagtttaagctcaaagggaatgcgaacagccattttcgtgtttcgaaaaccataaaggatccaaagacaaaacaaacgttttttaaattaacggaggtttacaaaggaattccgatttacggctttgaacaagcggtcgcgatgaaggaaaacaaacaagtgaaaagtttctttggaaaggtgcatccgcaaatcaaggacgtctccatcacaccgtctatttctgagaaaaaagcaatacatgcagcaaggcgtgagctcgaggcttccattggaaaaatcgaatatcttgatggggaaccaaaaggcgaattatatatctatccacacgacggtgaatatgatctcgcctaccttgtgagactctcgacatctgaacctgagcctggctattggcattatttcatcgatgccaaaaacggaaaggtcattgagtcctttaatgccattcatgaaacggcaggtacaggaatcggcgtatcaggtgatgaaaaaagctttgacgtcagagaacaaaatgggcgcttttatttggctgacgaaacaaggggaaaagggatcaatacatttgacgcgaagaacctgaacgaaaccttgtttacgcttttgtctcaactgatcgggtatacgggcaaagaaatagtcagcagcacgtccgtatttaatgaacctgcggctgtagacgcacacgcaaatgcgcaagccgtttacgattattacagcaagacatttggccgtgattcttttgatcaaaacggagcaaggattacgtctaccgtgcatgtcggcaaacaatggaacaatgctgcgtggaacggtgtccagatggtatacggggatggagacggttcgaaatttaagccgctgtctggatcgctcgacattgtcgcgcatgaaatcacacacgcagtcacacagtattccgccggtcttttatatcaaggagaacccggtgcattaaatgagtccatttctgacattatgggcgcgatggctgaccgtgatgattgggagatcggcgaagatgtctatactcctggtattgcaggagattcattgcggtcattggaggacccatctaagcagggaaatccagatcattactcgaaccgctacacaggaacagaggattatggcggagtccatatcaattcgtccattcacaataaagcagcttatcttcttgcagaaggaggcgtgcaccacggtgtacaggttgaagggattgggcgtgaagcaagtgaacaaatttactatcgggctttaacatattatgtaacggcatctacagatttcagcatgatgaagcaagcggcgattgaagctgccaatgatttatacggtgaaggctcgaagcaatcagcttcagtcgaaaaggcgtatgaggctgtcggcattctatga

SEQ ID NO: 79 - protein, 538 aa, Bacillus subtilis
  REGION 1..538: note = Description of Sequence: nprB
LRNLTKTSLLLAGLCTAAQMVFVTHASADQSIKYDHTYQTPSYIIEKSPQKPVQNTTQKESLFSYLDKHQTQFKLKGNANSHFRVSKTIKDPKTKQTFFKLTEVYKGIPIYGFEQAVAMKENKQVKSFFGKVHPQIKDVSITPSISEKKAIHAARRELEASIGKIEYLDGEPKGELYIYPHDGEYDLAYLVRLSTSEPEPGYWHYFIDAKNGKVIESFNAIHETAGTGIGVSGDEKSFDVREQNGRFYLADETRGKGINTFDAKNLNETLFTLLSQLIGYTGKEIVSSTSVFNEPAAVDAHANAQAVYDYYSKTFGRDSFDQNGARITSTVHVGKQWNNAAWNGVQMVYGDGDGSKFKPLSGSLDIVAHEITHAVTQYSAGLLYQGEPGALNESISDIMGAMADRDDWEIGEDVYTPGIAGDSLRSLEDPSKQGNPDHYSNRYTGTEDYGGVHINSSIHNKAAYLLAEGGVHHGVQVEGIGREASEQIYYRALTYYVTASTDFSMMKQAAIEAANDLYGEGSKQSASVEKAYEAVGIL

SEQ ID NO: 80 - DNA, 1146 bp, Bacillus subtilis
  misc_feature 1..1146: note = Description of sequence: aprE encoding sequence
  source 1..1146: mol_type = genomic DNA
gtgagaagcaaaaaattgtggatcagcttgttgtttgcgttaacgttaatctttacgatggcgttcagcaacatgtctgcgcaggctgccggaaaaagcagtacagaaaagaaatacattgtcggatttaaacagacaatgagtgccatgagttccgccaagaaaaaggatgttatttctgaaaaaggcggaaaggttcaaaagcaatttaagtatgttaacgcggccgcagcaacattggatgaaaaagctgtaaaagaattgaaaaaagatccgagcgttgcatatgtggaagaagatcatattgcacatgaatatgcgcaatctgttccttatggcatttctcaaattaaagcgccggctcttcactctcaaggctacacaggctctaacgtaaaagtagctgttatcgacagcggaattgactcttctcatcctgacttaaacgtcagaggcggagcaagcttcgtaccttctgaaacaaacccataccaggacggcagttctcacggtacgcatgtagccggtacgattgccgctcttaataactcaatcggtgttctgggcgtagcgccaagcgcatcattatatgcagtaaaagtgcttgattcaacaggaagcggccaatatagctggattattaacggcattgaatgggccatttccaacaatatggatgttattaacatgagccttggcggaccttctggttctacagcgctgaaaacagtcgttgataaagccgtttccagcggtatcgtcgttgctgccgctgccggaaacgaaggttcgtccggaagctcaagcacagtcggctaccctgcaaaatatccttctactattgcggtaggtgcggtaaacagcagcaaccaaagagcttcattctcaagcgcaggttctgagcttgatgtgatggctcctggcgtatccatccaaagcacacttcctggaggcacttacggtgcttacaacggcacgtccatggcgactcctcacgttgccggagcagcagcgctaattctttctaagcacccgacttggacaaacgcgcaagtccgtgatcgtttagaaagcactgcaacatatcttggaaactctttctactatggaaaagggttaatcaacgtacaagcagctgcacaataa

SEQ ID NO: 81 - protein, 381 aa, Bacillus subtilis
  REGION 1..381: note = Description of sequence: aprE
VRSKKLWISLLFALTLIFTMAFSNMSAQAAGKSSTEKKYIVGFKQTMSAMSSAKKKDVISEKGGKVQKQFKYVNAAAATLDEKAVKELKKDPSVAYVEEDHIAHEYAQSVPYGISQIKAPALHSQGYTGSNVKVAVIDSGIDSSHPDLNVRGGASFVPSETNPYQDGSSHGTHVAGTIAALNNSIGVLGVAPSASLYAVKVLDSTGSGQYSWIINGIEWAISNNMDVINMSLGGPSGSTALKTVVDKAVSSGIVVAAAAGNEGSSGSSSTVGYPAKYPSTIAVGAVNSSNQRASFSSAGSELDVMAPGVSIQSTLPGGTYGAYNGTSMATPHVAGAAALILSKHPTWTNAQVRDRLESTATYLGNSFYYGKGLINVQAAAQ

SEQ ID NO: 82 - DNA, 942 bp, Bacillus subtilis
  misc_feature 1..942: note = Description of sequence: mpr encoding sequence
  source 1..942: mol_type = genomic DNA
atgaaattagttccaagattcagaaaacaatggttcgcttacttaacggttttgtgtttggctttggcagcagcggtatcttttggcgtaccggcaaaagcggcagagaacccgcaaacttctgtatcgaataccggtaaagaagctgatgctacgaaaaaccaaacgtcaaaagcagatcaggtttccgccccttatgagggaaccggaaaaacaagtaaatcgttatacggcggccaaacggaactggaaaaaaacattcaaaccttacagccttcgagcattatcggaactgatgaacgcaccagaatctccagcacgacatcttttccatatagagcaaccgttcaactgtcaatcaagtatcccaacacttcaagcacttatggatgtaccggatttttagtcaatccaaatacagtcgtcacggctggacattgtgtgtacagccaggatcatggatgggcttcgacgataaccgccgcgccgggccgcaatggttcgtcatatccgtacggtacttattcaggcacgatgttttactccgtcaaaggatggacggaaagcaaagacaccaactatgattacggagctattaaattaaacggttctcctggaaacacggttggctggtacggctaccggactacaaacagcagcagtcccgtgggcctttcctcgtcagtgacaggattcccgtgtgacaaaacctttggcacgatgtggtctgatacaaagccgattcgctccgctgaaacgtataagctgacctatacaaccgatacgtacggctgccaaagcggctcgcctgtttatcgaaactacagtgatacagggcagacagctattgccattcacacgaacggaggatcgtcatataacttgggaacaagggtgacgaacgatgtattcaacaatattcaatattgggcaaatcaataa

SEQ ID NO: 83 - DNA, 510 bp, Bacillus subtilis
  misc_feature 1..510: note = Description of sequence: xpf encoding sequence
  source 1..510: mol_type = genomic DNA
atgcaagacttactatttgaatataaacgaacgctcaaacaaacaagaaaccaatataaaccgctcgctgaggcagatgaatccgtgctctcagctgaagagctgaaggataaaaaaatcatcagaaatatgattactgatcttgaatatgtaacagaatggcttgaaaaaggaaggcagcccggcatcagacgggcgattgaccggcgtgatgcttaccagcggctgatgatcaaggacccgagaatcatcgaatcattttccagcgctatgatgtttgagccggacggacaggtatcagaagaagacagagatagaattcgagaagcattagccctgttaacggacagagaaaaggaaatgtttttgctgcataaggtagaatgtttttcttatgaacggatcgccgatcttctcggcgtaaaaaaatcgacagtgcaaacgacgattaaacgggcgagtttaaagatgcaaagacagcaggaagacatgaatcgatcacttgcctga

SEQ ID NO: 84 - DNA, 615 bp, Bacillus subtilis
  misc_feature 1..615: note = Description of sequence: lytC1 encoding sequence
  source 1..615: mol_type = genomic DNA
atgttatggaggagcttggcgctgtgcggattggctttgacgctcgcgccttgtgcacaggcagcagagccgatagaagggaaaacagtgtatattgatgccggacacggcggtgaagatagtggagcggtcggaaacgggctctttgaaaaggatattaatttggctgtctcagagcatgtgacagacaaactaaaagaggaggtagccaatcctgttgcatcccggtctgacgatcattttctgaccttggaggaaagagtggctaaggcaagtgccaatcaggctgacctttttgtcagcattcatgtgaattcaggggttgcttcagcttcaggaacagaaacgtattttcaatctgattatgaaggggagaacagccggcgtctcgcatccgatattcagtcagagctcgtttcttccttacaaacgagagacaggggcgtgaaagaatcagacttttacgtcattacatattcacaaatgccaagtgtgttggcggagcttgggtttatcacgaacagctctgacgcggacaagctgggaagtgaagaataccagcaaaaggccgcagatgcgattgtcaacggcattgattcttattatgatcagtag

SEQ ID NO: 85 - DNA, 1491 bp, Bacillus subtilis
  misc_feature 1..1491: note = Description of sequence: lytC2 encoding sequence
  source 1..1491: mol_type = genomic DNA
ttgcgttcttatataaaagtcctaacaatgtgttttctggggctcatactttttgtgccaacagctttggccgataattcagtgaaaagagtcgggggaagcaatagatacggcactgctgtacaaatatcaaagcaaatgtattcaacagcaagtacagctgtaattgttggtgggagttcctatgcagatgctatttcagcagcaccccttgcttaccagaagaatgcgccattgctttacactaattctgataagctttcatatgaaacgaaaacaagattgaaagagatgcagactaaaaatgtaattattgtaggcggaacacctgctgtttcatctaacactgctaaccagattaaaagtttggggataagtattaaacgaattgcaggaagcaaccgttatgatacggctgcacgggtggcaaaagcgatgggtgcgacttcaaaagctgttattttgaatggcttcttatatgcagacgctccggccgtcattccttatgcagcgaaaaacgggtatccaattctttttacaaataaaacatctataaatagtgcgacaacgtctgtgataaaagataagggaatttcgagtaccgttgttgtaggaggcactggaagtatcagcaatacggtatacaacaagttaccttctcctacaagaattagtggttcaaacagatatgagcttgctgcaaatatcgtacaaaaacttaatttatcaacaagcatcgtatatgtaagcaatggattcagctaccctgactctattgcaggagctacactggcagctaagaagaagcaatctcttatccttacaaatggtgaaaatttatctacaggagcccgtaaaattattggaagtaaaaacatgtcaaactttacgattatcggaaacactcctgccgtaagcaccaaggttgctaatcagctaaagaatccagttgtaggtgaaacaatctttattgatccgggtcacggtgatcaagattcaggagcaatcggcaatggactccttgagaaagaagtcaaccttgatatagcgaaaagagtcaatacaaagctaaatacttcaggtgctcttccagtactgtcaagatctaatgatactttttattctttacaggagagagtaaataaagcagcttctgcacaagcagatttatttatcagtatacatgcaaatgctaatgatagctcatcaccaaatggaagtgagacgtactacgatacaacatatcaagctgcaaatagcaagagactggctgaacaaattcaaccaaagttagcggctaatcttggaacgagagaccggggagtaaaaacagccgctttctatgttattaaatattctaaaatgccgagtgttttagttgaaactgcctttatcactaatgcatcagatgcaagtaaattgaagcaagcggtttataaagataaagctgcacaagctattcatgacggcacagtatcttattacagataa

SEQ ID NO: 86 - DNA, 585 bp, Bacillus subtilis
  misc_feature 1..585: note = Description of sequence: sdpC encoding sequence
  source 1..585: mol_type = genomic DNA
ttgaagaaggcgtttctagtatttttgtcggttgtattggtgacgactgtgtttttggtgaagcagcaagaaagtgtggcacaggcaaagcagcttgagtattcaggtgaggaaatttttaaaggctttgtgtttgcccaaggggaagttggcaaacagcttccagaggtctttaataaagcgatgacagacaaactcaacacaaaacaggcaaaggcttttgccaatcaggttgtcgctgatattaaaaaagaggatgctgacttttttgataacctgaagaaagctgtttacagcaaagatgcattgaaagtggatgaactgctgaaaaaagcaggtcaaatcgttgaagaaaaagtagaagctgcaaaggaaatcgccgcttctaaggatgatacatccagagttcaggccgagcttgtcaacactgttgataccgctaactatttctattatgtttcttatgttgctgcagcaggtgccctgattctgatcattctcgccattgatattacgccgattgcgatttcagacaatgtggatcgcgaaatggcaatcagaacgctggttgatgaattaaactag

SEQ ID NO: 87 - DNA, 3609 bp, Bacillus subtilis
  misc_feature 1..3609: note = Description of sequence: CapABC locus sequence
  source 1..3609: mol_type = genomic DNA
gctgggcaaataaaaagagagtgtctcctcagacactctcttttttgaattatttattggcgtttaccggttcttcctgctgctggattttattcatttccatatcaatcttctgtttttcctgatctgtcagctgatcattgaatttaaaagctgacataaacatgaacacgatggctacggcaacaaacggccagatggctttgacaaatttcatctttatcactccgtttatttagattttagtttgtcactatgatcaatatcaaacgtcagttttccgtcttctactttccaagcgaaattagagtctttcgtcagttcgcgaataatggttttctgtttaaggctgtcttttttcacaggtgcaggtgtcgcttcatggatatcgatcggtgtcacttcaaagcggcctgttccatttttcttcaggtgatactgaaccagtgcactgtctcttgttctcgtccagccttggtcaaagacaaagttgccgaggctgtagaaaatgacggttccgttatatacttcaatcggttctaagacgtgcggatgatggccgacgatgatgtcagctcccgcatcagacatggctcttgcaagctggcgctggcggtcgtttggatcattgtcatactcttggccccagtgtgactgcacaacaacgatgtccgcatgttttttcgcttctgaaatcatagggatgaagatttcaggatctgcgggcagcacgcccggcgtattctttttagccgcgaaacctttcccggacacatcggtaaagccaagcgttgcaattgttaccccgttgactttctggtacgaaattttctttttcgcatcacttaagctgtatcccgctccaacgatatcaaggttttgcttcgcaaattctccaagcgtatctttcatgccctgaacgccgtaatccattgcgtggttgtttgcgctgttgagaactgtgaaattcatgtccttcaagactttcactgattccttattcgtctgcagatgaatctctttatctgcttgtttataattcttttgataggttaccgggttttcaaagtttcctgctacataatccgaagctctaaagatcggttcaacatattgaaaaatactgtctgcccctttttgctccgttactttttcaacatagcgtcccatcataatatcgcctacaaatgaggctgaaagtacgtcgtcagaatacgttttgaccttcggcgtttccgcttttcccgcccacatgaaagcgaacataaggacaaaaacgatcggaatggcaataaatacgtgcttattggttttctttttttgctgttttgtcagctttagcagcttttcatgaaagctcagttcttttttcatcgtttgacacaccttacattaaattaagtagtaaacaaacatgatagcaaaggtcgctccgctcaatagcagcgtgcttccgaacgtaatggttaaaccttgtttctgaatggtattggcaattaaacctggcacgatgatgccgattcctcgaaattctgcgatttcaaatggtacaatcgggtatagaaaatcaaacgcgatttttaggacgatccctgttatcagcatggcagcgaattttctgcgtccgtacaaaatcataaatttggataaaccgtatttcacgataacataagtgagcaagctcactagcaaaacaagtaaaataaagaccggctgattaaacacaagtcctaaatatcccggtacaacaagtcctgccggcacgatccctgttttttccgcaaaaattaaactgagtagtacacctaaaattagtgcgatgtataaatctgatccgaacatgtttgcatttccccctagcttacgagctgcttaaccttgtattcgtggattttttcaattaaaggctctgcggcaccatgaatattgccgacgccatatatgacacggttgtgcattcttttctttaacaattccataatttcatctgttgacttatactctagatcatgcagtttgtctgcaggaattttgccttcttcgtaggcttttacgaccggttctgttgtttcaccgattaagatcagttcacttgcttcaatataaggcaatacgtcatttgcgaattgctgtgtccgatcgacacggtctgcgcggcagttcatgatgatgatcggatcatcggtcgggtaaccgatttcttttacacgtttccatatattcaaagtagaagaagcgtcgtttgcggcaaacccattaacaaagtgcccaggctcgctcggactgatcagcggaagaattctcattgctcccggatctggcggcgcattcagcattcccttaaatgctgtttcttcgtcaatgccgagtgcttgagccacacccagcgccagagaagcgttatcagggaataccatgtattcaaatttacgtaaatactcatctgtaatttttgagttatcagcaatgatgacttttgtgtttcgttcttttgctttttgtttaaagaactcggtatattcactatctgtaatgacaagatggccattataaggaattgtagcagtaaacgcttctgcaatttcatcaagcgtcggccccatgacatccatatggtcttccaaaacattcacaatgacgccgatattggcctgcagaagttcttcctgaaagatgatttgataatctgggttaacagccatgcattcactgacaatcgcgttagcccctctttctactgtttctctcatgacttctttttgctctccgatattcggcccctgaggtttccgtttaatcggcttttcctccggtgtgtcccagtaaatcattcttgcatctgttcctgttgtttttccaacagtcttgtaaccggcttctattaatattccggttgtcagccttgtcacagtcgattttccgcggatgccgttaatattcacccgaacagggagggcatcaatgtttttctgatgtcgtcgtttttctaatattccgatgaccagtatgacagcacaggctataatgagtaaccacattgcttttcgacatctccttctatattgttgtaaattcattcatcagtatatagaatcactatgaattctcaatcggcattatgtaacataatcttccctaatcgactaagccaaacttctcttttgaaagagattttatacctacaaactgttttctatttttggaaaacagcaggacttataccttatcacttttttaaaaaattgaagagaatgcgctttcatttttctcctgatatccttctggacgtatagtcacaccctgctgtttgtatttaatatgcatttcaaatcaatctttttttcagcctgtgttatcaagcatttcctgctatcatgcgtgtttccggttcttatgaacacaaaataattttatcctgtttcttaaggacaaggtcataatgtcatcctttctgcatggaataagcaatatgaggcccattccaaaatgactaaggaggttcgagatgaaaacgctaaacatacgagtccgaattctctaacataattaaacattttctgggatgatagtcttttctgtttctcaccatttacaggtctaaacgcatga

SEQ ID NO: 88 - DNA, 1029 bp, Clostridium perfringens phage
  misc_feature 1..1029: note = Description of sequence: "PlyCM a lytic enzyme targeting Clostridium perfringens"
  source 1..1029: mol_type = genomic DNA
atggaaagccgtaataacaataacctgaagggcatcgatgtgagcaactggaagggcaacatcaattttcaaagcgtcaaaaatgacggtgttgaagttgtttacattaaggcaaccgaaggcaactacttcaaagacaaatatgctaagcaaaactacgagcgcgctaaagaacagggtctgcgtgtgggcttctaccactttttccgcgcaaacaaaggtgccaaagatcaggcgaacttcttcgtgaattacctgaacgaaatcggtgcggtcaattatgactgtaaactggcactggacatcgagactaccgaaggcgtcggtgcgcgtgacctgacctctatgtgcatcgagttcctggaagaggtgaagcgtattacgggtaaggaagttgtcgtgtacacctataccagcttcgcgaacaataatctggattcccgtctgtctagctatccggtgtggattgcgcactatggcgtcaacaccccgggtgcgaacaatatctggagcgagtgggtgggtttccagtacagcgagaatggctccgtcgccggtgtcagcggtggctgcgatatgaacgaatttaccaatggtatctttattgactcgaacaatttcacgttggacaatgcaacgaccaaaaatgttagcattaagctgaacattcgcgccaagggtacgaccaacagcaaagttattggtagcattccggcgaacgaaaagtttaagatcaaatgggttgatgaagattacctgggttggtattacgttgagtataacggtatcgtgggttacgttaacgccgattacgtcgagaaactgcaaatggcgaccacgcataatgttagcacctttctgaatgtacgcgaggagggttccttgaatagccgtattgtggacaagatcaacactggcgacatctttcgtattgactgggttgatagcgatttcattggttggtatcgtgtgacgacgaaaaacggcaaggtcggctttgttaatgcagagtttgtgaaaaagttgtaa

SEQ ID NO: 89 - DNA, 543 bp, Clostridium perfringens
  misc_feature 1..543: note = Description of sequence: "CP025C a lytic enzyme targeting Clostridium perfringens"
  source 1..543: mol_type = genomic DNA
atgtcgaagatttttggtttagatgcgggtcattgtacgagcggcgcagatacgggtgcgcagggcaatggttacaaagaacaagacttgacccgtcaagttgttacctatctgagcgaatacttggagaaagagggccacactaccaagtactgccattgcaatagcgcgagcacggttaacgaatccctgcgctatcgtgtgaacaaagccaactccatcggtgtcgactacttcgtgagcatccacctgaacgccggtggcggcgttggtaccgaaacgtacatctgcgcgcgtggcggcgaggccgagcgcgtggcgaaacgcgtcaattctaaactggtgcagtacggttatcgtgaccgtggtgtcaaggttggtaatctgtatgtgattaagaacaccaatgcaccggctatcctggttgagatctgtttcattgacagcagcagcgatgtggcaaagtttaacgcgaaggcaatcgcgaaagcgattgctgagggtctgctggataaaaccattggtgaagtcgagaataagtaa

SEQ ID NO: 90 - protein, 246 aa, Staphylococcus simulans
  REGION 1..246: note = Description of sequence: lysostaphin
AATHEHSAQWLNNYKKGYGYGPYPLGINGGMHYGVDFFMNIGTPVKAISSGKIVEAGWSNYGGGNQIGLIENDGVHRQWYMHLSKYNVKVGDYVKAGQIIGWSGSTGYSTAPHLHFQRMVNSFSNSTAQDPMPFLKSAGYGKAGGTVTPTPNTGWKTNKYGTLYKSESASFTPNTDIITRTTGPFRSMPQSGVLKAGQTIHYDEVMKQDGHVWVGYTGNSGQRIYLPVRTWNKSTNTLGVLWGTIK

SEQ ID NO: 91 - DNA, 231 bp, Bacillus subtilis
  misc_feature 1..231: note = Description of sequence: Nucleic acid encoding mersacidin E1
  source 1..231: mol_type = genomic DNA
atggacaaagaagaattagaaaaaattgtaggtaataactttgaggaaatgagtttacaaaaaatgacagaaattcaaggtatgggtgaataccaagtggattcaacaccagcagcttctgcgatttcacgggcaacaattcaagtatcacgtgcatcttctggaaaatgtctaagttggggtagtggtgcagcatttagtgcttattttactcataaaagatggtgctag

SEQ ID NO: 92 - protein, 76 aa, Bacillus subtilis; identical to SEQ ID NO: 23
  REGION 1..76: note = Description of sequence: mersacidin E1

SEQ ID NO: 93 - DNA, 186 bp, Bacillus subtilis
  misc_feature 1..186: note = Description of sequence: Nucleic acid encoding mersacidin E2
  source 1..186: mol_type = genomic DNA
atggaagaaaaagaattagaaggtgtaatagggaattcgtttgaaagtatgactgtagaggaaatgacaaaaattcaaggtatgggtgaatatcaagtagattcgacgcctggatattttatggaaagtgctgccttttcagctcttacagccaatataacaagacatgctatgcatcatcattaa

SEQ ID NO: 94 - protein, 61 aa, Bacillus subtilis; identical to SEQ ID NO: 22
  REGION 1..61: note = Description of sequence: mersacidin E2

SEQ ID NO: 95 - protein, 37 aa, Leporidae sp.
  REGION 1..37: note = Description of sequence: rabbit CAP18
GLRKRLRKFRNKIKEKLKKIGQKIQGLLPKLAPRTDY

SEQ ID NO: 96 - protein, 37 aa, Homo sapiens
  REGION 1..37: note = Description of sequence: Human CAP18 peptide LL37
LLGDFFRKSKEKIGKEFKRIVQRIKDFLRNLVPRTES

SEQ ID NO: 97 - protein, 154 aa, Camelus sp.
  REGION 1..154: note = Description of sequence: EAT-1F2 antibody
EVQLVESGGGLVQAGGSLRLSCAGSGRTGSLYSMGWFRQAPGKEREFVAAITWRPSSTYYADSVKGRFTISRDDAKNTVYLQMNSLKPEDTAVYFCAARPRGGLSPTPQAYDYWGQGTQVTVSSAAASGSLEQKLISEEDLNGAAHHHHHHGAA

SEQ ID NO: 98 - protein, 141 aa, Camelus sp.
  REGION 1..141: note = Description of sequence: EAT-1G4 antibody
EVQLVESGGGLVQPGGSLRLSCAASGSIATINDMGWFRQAPGKQRDWVATIVSDGSTAYADSVKGRFTISRDNAKNTVYLQMNSLKPEDTAVYYCSARRHYGQGTQVTVSSAAASGSLEQKLISEEDLNGAAHHHHHHGAA

SEQ ID NO: 99 - DNA, 462 bp, synthetic construct
  misc_feature 1..462: note = Description of sequence: EAT-1F2 antibody encoding sequence
  source 1..462: mol_type = other DNA
gaggtgcagctcgtggaaagtggcggaggtcttgttcaggctgggggatcgctccgtctgagctgtgcggggtctggcagaacaggtagtctctattccatgggttggtttcggcaggccccgggtaaggagcgggagttcgttgcagcgattacgtggaggcccagctctacctactacgcggacagcgtaaagggacgattcaccattagtagagacgacgcaaagaatactgtatatttgcagatgaattcgttgaagcctgaggacaccgctgtctatttttgcgcggcgcgaccgaggggcggtctctccccgacacctcaagcatatgattactggggacaagggacccaagtcactgtatccagtgcggccgcgagcggcagccttgaacaaaagctgataagcgaggaggatctcaatggtgctgcacatcatcatcaccatcacggggcagcg

SEQ ID NO: 100 - DNA, 423 bp, synthetic construct
  misc_feature 1..423: note = Description of sequence: EAT-1G4 antibody encoding sequence
  source 1..423: mol_type = other DNA
gaagttcagcttgtagagtccggtgggggtcttgtacagcccggcgggagcttgcgactctcatgcgctgcttccggaagcattgcgacaataaatgatatgggttggtttagacaagcccccgggaagcagcgtgactgggtcgcgactattgtgagtgacggcagcacggcttatgcggactcagtgaaagggagatttacgatttcgcgagataacgcgaaaaacactgtatacctgcagatgaattcactcaagccggaagatacagctgtgtattattgttctgcccgacggcactacggacaggggacccaggtcacagtctcgagcgctgccgccagtgggtcactcgagcagaagctgatatcagaggaggaccttaacggtgcggcgcaccatcaccaccatcatggtgcggcg

SEQ ID NO: 101 - protein, 148 aa, Camelus sp.
  REGION 1..148: note = Description of sequence: ENB-1A4 antibody
EVQLVESGGGLVQAGGSLRLSCAASGSIFSTNVMGWYRQAPGKQREFVAGITIGGTARYPDSVKGRFTISRDNTQNTVYLQMNNLKPEDTAVYYCNAVLPSDQRRWSWGQGTQVTVSSAAASGSLEQKLISEEDLNGAAHHHHHHGAA

SEQ ID NO: 102 - protein, 143 aa, Camelus sp.
  REGION 1..143: note = Description of sequence: ENB-1D11 antibody
EVQLVESGGGLVQTGGSLRLSCTASGTIDMTYGLIWYRQAPGKERELVASIRRDGRTNYADSVKGRFTISIDNAKNSIHLQMNSLKPDDTARYYCNSPYHALWGQGTQVTVSSAAASGSLEQKLISEEDLNGAAHHHHHHGAA

SEQ ID NO: 103 - DNA, 444 bp, synthetic construct
  misc_feature 1..444: note = Description of sequence: ENB-1A4 antibody encoding sequence
  source 1..444: mol_type = other DNA
gaggtacaactggttgagagtgggggtggtttggtgcaagccggaggttccttacgtttgtcttgcgcggctagtgggagcatcttttcaacaaacgtaatggggtggtaccgccaagccccaggtaagcagcgggaatttgtggccgggataacgatcggaggaactgcgaggtatcctgatagtgtgaaagggcgtttcacaattagtcgagataatacacagaatactgtctatctccaaatgaataatctcaagcccgaagacacagcagtttattattgtaatgccgttctcccctctgatcagcgtcgatggagctggggacaaggcacccaggttacggttagcagcgcggcagcgtctggttcgctcgagcaaaagctcatatctgaggaggacctgaacggggcagcccaccatcaccaccatcacggagcagct

SEQ ID NO: 104 - DNA, 429 bp, synthetic construct
  misc_feature 1..429: note = Description of sequence: ENB-1D11 encoding sequence
  source 1..429: mol_type = other DNA
gaggtacagctggtggagtccggcggtggtttggtgcaaaccgggggtagtctgcggcttagttgcacggcgtctgggacaatagacatgacttatggtctcatatggtacaggcaagcgcctgggaaagagagggaactcgttgcgagtatcagaagggacggccgcacaaattacgctgattcagtgaaagggcgcttcactatctcgatcgataatgcgaaaaacagtattcaccttcaaatgaactcccttaagcccgatgataccgccaggtattattgcaacagcccatatcacgcactttggggtcagggtacgcaggtaacagtgtctagtgcggcagcctctggtagtttggagcaaaagttgataagtgaggaggacttaaatggggcggcacatcaccaccaccatcatggggcggct

SEQ ID NO: 105 - DNA, 1098 bp, Eimeria tenella
  misc_feature 1..1098: note = Description of sequence: EmGAPDH
  source 1..1098: mol_type = genomic DNA
atggtgtgccgcatgggcatcaacggattcgggagaattggaaggctggtgtttcgggccgctatggcaaaccccgaagtggaggtggtggccgtgaatgatcctttcatggacgtgcagtacatggcctaccagctgaagtacgatagcgtgcacggcaaatttcctggagaggtgtccgtgaaggacgggaatctggtggtggaaggcaagactatccaggtgttcgctgagaaagatcctgcagccattccatgggggaaagtgggcgcacactacgtgtgcgaaagcacaggggtgtttactaacaaggagaaagctggcctgcacatcagcggcggagctaagaaagtgatcatttccgcaccccctaaggatgacacaccaatgttcgtgatgggcgtgaatcacgaggaataccagcccactctgcaggtggtgagcaacgcatcctgcaccacaaattgcctggctccactggcaaaggtggtgcacgaaaaatttgggattgtggagggcctgatgactaccgtgcacgccatgaccgctaaccagctgacagtggatggacctagcaagggcggcaaagattggagagcaggaagatgcgctgggagcaacatcattcctgcctccacaggagctgcaaaggctgtggggaaagtgatcccatccctgaatggcaagctgactggaatggccttcagagtgccaacccccgatgtgagcgtggtggacctgacctgcaggctgtccaagcccgctaaatacgaagatatcgtggccgctattagagcagccagcgagggacctctgaagggcatcctgggagtgacagaggaagaggtggtgtcccaggatttctgcggcgacaagaggagctccatctttgatgtgaaagcaggcatccagctgaacgacagcttcgtgaaactggtgtcctggtacgacaacgaatggggatacagcaatagactggtggatctggccatctacatgtccaagaaagacggcaatggagctgcacaccatcatcaccaccaccaccaccacggagcagcttggagccacccccagtttgagaagggggcagcctga

SEQ ID NO: 106 - DNA, 918 bp, Eimeria tenella
  misc_feature 1..918: note = Description of sequence: Ea 14-3-3
  source 1..918: mol_type = genomic DNA
atgggaatcgaggatattaagacactgcgcgaggaacacgtgtaccgggctaaactggcagagcaggccgaacgctacgacgagatggcagaagccatgaagaacctggtggagaattgcctggatcagaacagctccacacccggcggaaaaggggacgaactgactgtggaggaacggaacctgctgagcgtggcctacaagaatgcagtgggagcaagaagggcatcctggagaatcattagctccgtggagcagaaggaagcaaaccggaatcacatgactaataaagccctggccgctagctacagacagaaggtggagaacgaactgaataaaatctgccaggagattctgaccctgctgacagataaactgctgcctagaaccacagacagcgaatccagggtgttctactttaagatgaaaggcgattactacaggtacatcagcgagttctccaacgaggaaggaaagaaagctagcgcagaacaggccgaggaatcctacaagagagctacagacactgccgaggctgaactgcccagcactcaccctatcaggctgggactggccctgaactactccgtgttttactacgagattctgaatcagccacagaaggcttgcgaaatggctaaactggcattcgatgacgcaatcaccgagtttgatagcgtgtccgaggaaagctacaaggactccacactgattatgcagctgctgcgcgataatctgactctgtggaccagcgacctgcagactcaggaacagcagcagcagccagtgggagagggagcagaagcacccaaagtggaggctactactgaacagcagggagcagcacaccatcatcaccaccaccaccaccacggagctgcatggtcccaccctcagttcgagaagggggccgcttga

SEQ ID NO: 107 - DNA, 1431 bp, Eimeria tenella
  misc_feature 1..1431: note = Description of sequence: EF-1
  source 1..1431: mol_type = genomic DNA
atgggcaaggagaaaacacacattaatctggtggtgatcgggcacgtggatagcggcaagtccaccacaactggacacctgatctacaagctgggcggaattgacaaaaggactatcgagaagttcgagaaagaaagctccgaaatgggaaaggcctcctttaaatacgcttgggtgctggataagctgaaagctgagcgcgaacgggggatcacaattgacatcgcactgtggcagttcgagactcccgcctttcactacaccgtgatcgatgctcctgggcacagagactttattaaaaacatgatcaccggcacatcccaggcagatgtggcactgctggtggtgcctgcagaccagggcggcttcgaaggagcctttagcaaagagggccagacaagggaacacgctctgctggcattcactctgggcgtgaagcagatgattgtgggaatcaacaaaatggatgccacttcccctgagaagtacagcgaagctagatttaatgagattcaggcagaagtgtccaggtacctgaaaaccgtgggctacaacccagagaaggtgcctttcgtgccaatcagcgggtttgtgggcgataacatggtggaacgcagctccaatatgggatggtacaaggggaaaaccctggtggaggcactggacagcgtggaaccccctaagcgcccagtggataaacccctgcggctgcctctgcaggacgtgtacaagattggagggatcggaactgtgcctgtgggaagagtggagacaggagtgctgaaacctggaatggtggtgactttcgctccatccgggctgcagaccgaggtgaagagcgtggaaatgcaccacgcacagctggaacaggccgtgcctggcgataatgtgggatttaacgtgaagaatgtgtccgtgaaggacgtgaaaagaggacacgtggctagcgattccaagaatgacccagcaaaagccgctgcaagcttccaggcccaagtgattgtgctgcaccaccccgggcagatcaacccaggctacacacccgtgctggattgccacactgcccacatttcctgcaagtttgctgatctggagaaacgcctggacagaaggagcggcaaagcactggaagatagcccaaagtccattaaaagcggagacgccgctatcgtgcggatggagcccagcaagcctatgtgcgtggaggctttcatcgaatacccacccctggggagatttgcagtgagggacatgaaacagaccattgctgtgggcgtgatcaaggcagtggagaagaaagaagccggcggaaaggtgacaaaatccgcccagaaagcagccgctaagaaaggagcagcacaccatcatcaccaccaccaccaccacggagctgcatggagccacccacagtttgagaagggagcagcttga

SEQ ID NO: 108 - DNA, 726 bp, Eimeria tenella
  misc_feature 1..726: note = Description of sequence: Em surface antigen
  source 1..726: mol_type = genomic DNA
atggatactatcagctcccctctgagctgcctggagcagatgaacaaagtgcgggaagccgctggcctgcccaaattcgtggagaatactcagctgctgccttccgaagcccctaagaccccagatgacttttgggagaagctgtgcgctaaagtgagaggcgacccagctacagaagcagtgggcagcgcccctcagggaacttacgctttctaccctacctccgaggatgccggaaactgcactgcagccgtggagttttgggaaggcggattcagcctgtttaatgacaagctgccagaaaaatacatcgcaagctcccccaacacctacagcaatcagcgcgctgtgtccttcgtggcactgtttaaccccaaacctgatgcttccgtgcactgcacattcgcaaagtgccccaaaactgccccagaacctgacctgggcggcagaaggcgcctggctgcagaaaccctgaatagcgtgatctgcattacatcccctgaggctctggtgaacgaacaggcaccatttagcgaggatgtgtggaataagattactgctgctctgaccggcggcgtgaaagcagtgggaccaacagccctgattgctctggcagcactggcactgagcgcatccgtgctgattggggctgcacaccatcatcaccaccaccaccaccacggagcagcttggagccacccccagttcgagaagggcgcagcctga

SEQ ID NO: 109 - DNA, 1380 bp, Eimeria tenella
  misc_feature 1..1380: note = Description of sequence: EtAMA1
  source 1..1380: mol_type = genomic DNA
atgggatcctgcgctggacctgctgctggagtgcagcacaagctgcagcacaggcaacaacagcagcagcagcattcccacgcaagcacttcccacgcagcagctgtgctggcagcaagctccgatgctagcaccgactccaatcctttcatgcagcccccttacgctgagttcatggcacgctttaacatcccaaaggtgcacgggagcggcgtgtacgtggatctggggaatgacaaagaggtgaagggcaaaatgtacagagaacccggcggaaggtgccctgtgttcggcaagaacattgagttttaccagcccctggatagcgacctgtacaaaaatgatttcctggaaaacgtgcctaccgaggaagctgctgctgctgcaaagcctctgccagggggcttcaacaacaactttctgatgaaggacaagaagccctttagccctatgtccgtggctcagctgaacagctacccccagctgaaggcacggacaggactggggaaatgcgccgaaatgagctacctgaccacagccgctggcagctcctacagataccccttcgtgtttgatagcaagaaagacctgtgctacctgctgctggtgcctctgcagcgcctgatgggagagcggtactgcagcactagagggtccccacccggcctgtcccacttctgctttaagccactgaaaagcgtgtccctgaggccccacctggtgtacggaagcgcatacgtgggggagcgccctgatgactgggaaacaaagtgcccaaacaaggccgtgaaagatgcagtgtttggagtgtgggagggagggagatgcgaggaacagagactgagactgggagctcagactgcagctgctgcagccaaagaagactgctgggcactggccttcaataacccctttgctgcatccgatcagcctactagccaggacgaggccgctacctccccaggatactacttccccagcatcactcctagccagccaaagagcggcggagtgggagtgaattttgcctcctactaccctagcggagagtgcgtgctgagcggagaagtgcctacatgcctgctgccaaggcagggagcagccgctttcactagcgtggggtccctggaggaagaggaactgccacactgcgatcctacatttcctgcatccctggggtcctgcgacccaagctcctgcaaggcaattctgactgagtgcagaggcggcagactggtggaacagcagacagattgcgtgccagaggacggcagcaagtgcgaaagcaagggcggcggcggcgccgcacaccatcatcaccaccaccaccaccacggagctgcatggagccacccccagtttgagaaaggagccgcttga

SEQ ID NO: 110 - DNA, 12969 bp, Lactobacillus reuteri
  misc_feature 1..12969: note = Description of sequence: Full sequence of the PKS gene cluster
  source 1..12969: mol_type = genomic DNA
gcaagaatttatcccatagtttgcgagaaatccttttagaagagcttgcctaataatagcggctcaatataatttaaatttaaaaccacctaattagcaatcgtaaaattgttaattaggtggttttagtatagaaataacccctaaattcagaatactagaaaatctagtactattattttttccttttcgggaataatagacatgaaagacaagaaaagataagaaatggtaaggaaactttgtacagtttaataaaagcagttgagtattgactattggcgtaagttttgatttttttaattgtaatattaatagaattatttaatctatgaaatactaatttcacatttgcttttgtatgtgaataaatctctttttcttggatcttagagggttcgtaaggtaaggaattaatttgtttagtatattctttatccgtagtttctttaattaatttcttcgaaaaatgctttgatggtgttcgagagtttgaattgttgtttaagcttttaatagagttatctcttattttatttttttgatatttaggaatatttaagttattgacctgctgattgatgtaactaatagaattatgctttgcggtatttaaattcccatatagtccagttagaaatattgctacagctaaggaaacccctacttgtcttaaaacacctgcaacactttgtgaagcggttaagagataaccttcaaagtttgatgctgctaaaactgttattggacctgcaataatcccatacccagttcctaaaataatacaagtaaaaataattaaggtaatattatccatatcaatatgtgtaaataaatagtaagagatacccattaatagaaaaccagataagataatggctcgagatcctaatttgtctaagagaattgcagaaagtggtgacatgataaaaatcattcctgtaataggcgtgataagaagtgcagcttctaattcggttctatgttgtatatgggtaaaatatgttggtaaaattactgtaacagccaccagaaataaattacttaaaattatagaaacggcagagccggtaaattctctattcttaaataaaacaagaggaatcattggtgctttagcataatgctcagtaattaagaatagtatgaaagttaaaatgaaaatgaaaaacagaaggttgattgcaggacttttccacccccagcttcttccttgagtcaatattagagttaaagctgaaagtaaaattatacctaaaagggaacctaaataatcatttccttcatttgactttggttcgtgaaagttgaaagtagataaacaaataactagtgaaagtatagtaaaaggtatattaacgctaaatatagaatgccagcccataaattgagttagaatacctccgattgaaggaccaagagcagcagctaaaccttgagtgattcctaatgcggcaataactttttttcttgtctttactgtaacgatatttattccaatagtcattgaaagtggaaaaagaattgcggctcctaatgattgaatgccacggccaagaattaaaatagctaggttaggacttataccagaaatacttgatccaataagaaacataattaacccaattatatataagaaattcatacctaatttttctgcaagtttagatagtgggatcgttaaactagcaaaaagtatagtatatatgtttaatgcccaagacaaattagttagagtgacgtgaagttcgttttgaatagctggcaatgcaatattcataacagttgtatctaacatacataagaaaatactaatacacattgcaattattattagaaatttgttttttcttttggtcatacttgtttcctcactttgtttatattaacaatgttaatataaacaaaagaaaaataaatgtcaacaatattatcattgtaaatatgaacaatatgtattaatataaataaaaattagtgaggtgattttatgacagctgtaatagttggaattggtattactagttcctgtggagagtcctttacagaaattgaacaaaatgtaggtaaaggaaaaacaggtatttctaatatcgattattttgatacatctgagttaacatgtggaattgctggtaacttatcaaagaaaatatggaaagaggttttgcaaattgctgataaaaatgaattagattggagtagtagtctttcaatttatactattcagcgattacttgaatcgtataatatttcaaaaaaacaaagaattggtttatctcttggaacatgtaatgggggaattcattctttagcagaatatcttgatacttcaaatgataaatttttaaaaaattatcctccgtacattcagagtaaagatatcgcacattatttcaactttaacgggccaaagtattcttttaattcagcttgtgcggctagtgctaatgcaatagcttatggagcagaaatgattaataatagcgatgcagatcttgttgtgacgggtggttgcgatccaatgtcagaatgggtttttgctgggtttaattcattaagaacctttaatagtaaaaattgtatgccatacggtgaggaatatggacttaacctaggagaagctgctacatacttcttattagaagataaagataaggcaattaaaaaagggcataggatatatgcggaaattttagggcacggcttatcaaatgatgcttatcatcctacagcgcctgataaggatggttcagggatatcctatgcaataaaaatggctttaaaaaactcgggtctgaagcctgaagatattttatatattaactctcacggaacaggaactaaagccaatgatagtgcagaatacagaggatttaaaactgtttttagaaatgagatgccttttattagctcaatgaaaggatacgtaggccataatctgggagcagctgctagtacagaattagctataagtttaatcggtatgaatagtcagaaagttttgtatcctaactttaatttaaccaagtatagagaagattgtaacgatgagcatatcttaaaaaagccttattcattagatggatatgaagatatcaactttataaacaataatgctgcgtttggtggacaaaatgttgctgtaattttccatgttaatttagaaggaaaatatggtcatagtgaaaagaaacttaaaacacagcaacctatatatattaataattttggcgttgcaagtgataaagcttatatgacaaagcatggtattggtattcttgacgatttacgccccttaaagaaaaaatatccaaaattatataagcgacggatgaatatgttaactcaagtaagtattatcgcggctaaacaaacattgcaggatcagtatagtaattgtgggcttgtgtatggtacgccttttggtagtctttcatcaacactaaaatatgttgattctattcaaaaatatgggtttaaaaatgctagtggggcatattttccagatttagttattaattcaacgacggggcatatttgtcaagcgctttcattgaagagttatagttcatctataagttcaggaggtgatgaagacttaagagccttaattattgcacataatgcgcttaataaagggtacgcttcaactatgttagttggagcaggccaagaagagacagaactgggcaataaagtgttgaagcgtgaagttaataatcatgcaacatttttaagccttagtaacaaaaaaatgcaagaaacaatagcagaggttctatcttccggtgcaatgggatttaaaaataaaaaagagcttttgaccattatacgatcgaaaatagatgagaagttggctaatgatgcagatctaaaagtgataattcaaaataatagtgaaattacgaacgacgaattaataagttatttcaagaatgataacaatatcagtataaattctgataattttgcggatagtaattttaaatcatttgttaatcatagaaatgaaaataggttgttgcttgttggaatttcacaagtcaatgatgtttcgtttgcagatattaaaaaaataaaatagagaaagaggtaatactgatgaagcatagtattgaagaaattaaggatattttaaaagaaaaagtattaattgaacgattagagttagatgatgtagaacccaatgatatttcagataatgaaaatttatttgatgaagaaggactagcgttagattccgtggaagcattagatatcatgacaggaattagtgaagaatttggcattgacacatcaatgttagggcaggaagatataaaccattttcaaagcgttaatgatatggctaaatatatctcagagaatgaatagaggatagttatgaaatcagtacttatcacgggaataactggaggaataggaagaaaattaactgaagcttattcttcaaagggatatcatatttatggtacgtgtagtagaaattcagactctttacaacaatttaaagagaaatggcctagtgttgaaataattcaaataaatcatgatgacttgatagatgtaagtacagaatattcctttttttttagaaaagtgcaaccagatattgttattaacaatgctggaatagtgaaagataattttttagttcaaatgtcagtgaatgattttcaagaagtgttgactactaatttgatttcggcttgggtaatagtcaaagaaatgcttttacatttaaatgataataaaattcataaaatcattaatgtagcttcaatatctggaattatagggcgtgaaggacagtgtaactatgcagcaactaagggaggattagtaggcttatgtcaattgatagaacatttagctccgaaaggcagtaatgttatttcattttcagttgcaccaggattaattgatacagatataaagggaaaaatgccaaagaaaaaaatcgataatttaaagaaggccacattggcaaataggctaggaacaccagaggaagtatcaaaatttatttttaaactatctgaagaggatatttcgtatagtgatggaactttatataggattgatggtggagttttaaaatgaagataataaataatacgattcaagtaaccgacttgcttcaatcatatggaaaagatgaaaaagacatagtaataattggtcccagcccatttaatgaattagattgccttaaagaaacaaaaataatcgataaagttcagcttaatttagaggaagttttttcatttgtaaaaaataatagcgttgctttaatgaaaaaaagaagaggaaccattgcctttttattaaatccacaaagttttgagggaggcaataatatctattctccaatctataattcagcaattaagagctttttgaaatccttatcgaaggaaatgaatccattcagagttaaagttatggggataatcttacctttaacacaagatacaaaatcgactcggaaatatgatttagttacattaaagtacaaaggaattaataatgaaaagcaggtacaagatattctaagcttacttaagctttcagaaatactaaacggacaaattgtctcgctaggcgctgaattgaatctttagtaaaggagagggaaatcattttatttctagatcaaaatgcagttataaaaatgttgccgcagaaggagccattcaggttcttagatacggttgaatgctttgatagagaaaaacgtatgattactgcattgcaacaatttggtaatgaggaattcttctttaagggtcattttccaaataatccaatagttccaggggtacttctaacagaatcgattgctcaagcaggtttgatattgatttctttattagaaggccaaaaagtgaaaattggatatctagcccaaattgaaaagacaaaatttttcaaagaggtctatcccgacgagcaagtaaaggttaaatgttcattaaagaaaaaaataggtaaatactattacattgcaggagaagtctactcgcagcaattaaataaaagatgtatgagagcaacagtaatagtatgtatttgatatggtgatggttcatgataaaaattactgaaaatatagttcaaataaaactaaagcaaggcaaaaattatccagacgttaatgtttatgtacttctaaaagaaaaagtgttaattgatataggccccaaatcaattaatacacttaaccttttaaaaaaagaattagctaggttaggattaagttttgaaacacttaatttaattattctaactcaccatcatgttgaccatgtaggacttttagagtaccttccctctgggttacgtatcgttggacctgatcatttagacttttatagttcagatatttataaaaaaagtattcaaaaattgttagttgacgataatctctctattgaatttaaaaatgatatagaaaaacaacttactactgaaataattccaagtattaatagagaaaactacgttccttttagtgagtcaaagaaaattttgcaacaatttggtcttacagctgtagagctatcaggtcattctagtgaagatattgtaattactgattcagaaaataactgttttactggtgatattattattcctaaaattttttttaactgtatatatgaggttgataaagtaaggcccaaacatcaacgttggtcatattatcatgagcttaattttttagacaggttagtaaacctagtattgccaggacatggagatattctaaagttagaagaattaaaaaaggcagttttggttaatagaaaaagaatgagacggacagagaaaaaaataataagagagttaaataaagaaacagttaatggagtggagaatgtttgtcgaagtgtattccaaagttttttgccttatagcaaattcttaccgttttcagaagtagttagtgttatcgagagtaatgatgagagaattaactattgatattatttatataaatacactaaataataacagctttgcaagtttagattctagaaaaagaatcaaaaagttacagcatcagctaggacaatatatgctttctcaaatatcttataaaaaaggttattcaatttcccatagtcatatgtgtgtagccttagcaagttatgttaatagggttggtattgatattgaacttataaataaaacaaagaaggcaaggatacagttcctttcgaaaagcgaaaaacaattagtaaatagatatggttttacaagaatatggacactaaaggaagctatagctaagtatcataccgttgggttacctcggcttaatacagttgagattaaagaaataaatgcttcgaacgttatctattttgttaataaagcaccaagaaaattgcagtataaatttttagatataatcccttcttataggttgagtgtagtggcaaaaaaggtatcaagtttttgcattagaatcacacaagaagaagatttgaaggggctaataaggagaatgtaattaatgcaaggaagagacataattctaggaatacttgaacgaaataatagaacaggatatgaaattaatgatattttgaaaaatcaattatcttatttctatgacggaacatatggaatgatatatccaacattacgaaagcttgaaaaggaaggaaaaataaaaaaggaaaaaattgtgcaaaatgataagccaaataagaatgtttattctattacagatacgggaatagaagaatttaaagaatacttggattcttctattcaagatgatatttataaatcggactttttaatgcgtctcttttttggaaactcattaccaaatcaagaaattattagagctattaaacaagagatacaacgtaaaaatgaaaagatagatcaattaactgtaaattataaaaaatggaaaaaaaatggaatgagtaaaacacaagaaataaccgtcaaatatggtattgcgcagtataccgcaattgttcagatgctgacaaaagagcttgatacgttacgaagaaatgagatggatgattaatgtcattaggaattatatttagtgggcaaggagcacaaaaatctaaaatgggtcttgatttttatgaagatccactatttgctgaattacttaaccacgcaagtaatatatctggtctaaacatgttaaaaatcttggaaaacaaaaataatgagcttacagagactgttaatttacaaccaacattaacaacattgaattatggcatatatcgaatgctgaaaagggatatttttgatatgaaagtaagctgtatggcagggctttctttaggagaatattctgcactgattgcttctaatgctttaacttttgaacagggaatacaattactagtagaccgcggaaaatatatgcaggaagcttcgaatagtaatgcaggaaaaatgttagcacttataaaacctaaactaaaagagataactcaaatttgtgctttgtgtaaggttgaaattgctaattataattctccaaagcagatagtaataggcggacaaaatttgcaaattgaatttgcaaagaaaatgattatggagcgtaaagctgcattaagaataattgagttagaagtaagtggcgcctttcatacttcgttattttcaaatgttcaaaaacaattggaaaagcgattaaaagatgttaaatttgagaatccacaaattccggtagttagtaatactacagttgaggaatttcaaaaggaaagtcttacagccgtattatcaaaacaagttgctaatcctacatattttgaaaaagatattaagttaatgaaaaatacttatggattgacacatatagttcaaattggtcctggtaaggcattaagtaattttgtgaagcaaatgtcattaggaattaagacatataatatttctaatataaaagactatagaaaatttctgaatagttatagagatattaatttgaaaggaaagaaaaatggattttgagaaaattcagcaactaattcaaatgtttgaaagctctaatacaagagaactaaaaatagatgataataactttcacatttatcttacaaaaaacgtaagtaaagaaccaattcacgatataaaatttgaatcgaataaaattcagcaagcctcagaggcaaaagcaaacaggaaaacgataacagccccattggttggaacagtttatttagcctcttctcctacgtctaaaccgtatgttcaagtagggagccatattgataaaggagatacagtgtgtgtaatagaggctatgaagctaatgacggaaataaaaagtgaggttaccggaacaattgaaaaagttaatgtagagaatggagaattagttgaagttgggcaaccgttattttcagtttctggagaaaaagaaagttaatgaaagagtgaggtgtagtgatgttttctaaagtactagttgctaatcgtggagaaatagctgttcgtattattagaactcttcatgaattgggcattaaagcggtagctatttattcgattgttgatcaagaaagtcttcatgttcaattggctgatgaagcagtttgtgtaggtggagcacgaccacaggattcgtatttaaatactactaatattttaacagcagcaattggaacaggagcacaagcgatacaccctggctttggattcctttcagaaaacgctgagtttgcaagaatgtgtgaaaaatgcggaatagtatttataggtccgcgtgctgctacgattgatttaatgggaaataaagaaaatgcgcgcgagactatgcaaaagagagggatacctgttattcctggaagtagttcctacataacaaacagttatgatgcaaaaagagttgcagataaaataggatatcctattttaataaaggcggcagctgggggtggaggtaaaggtattagaagagttgtaacgcctgagcaaatgaaacaagaatttaataatgcgcaaagagaagctcgtatatcatttggtgatgatcgtatgtaccttgaaaaaataatgtgcaatgttaaacatattgaagtacaggtagttcgtgatagattcggaaatagtgtctattttccagaacgcgattgttcactccaacgggataagcaaaaaattatagaagagagtccatgctcggttatcaattcagaacaaagaaaaattttaggaaggtatgctattaaagcaattgaagcagttgattatcttaatacaggaactattgaatttttgatggataaaaataataaattttattttatggaaatgaatactcgtattcaagttgaacatactgtaactgagatggtaacgggaatagatctagtaaaggtacaactgatgatcgcttcaggtgaggaacttcctttttcacaaaataatattaagttaaatggggtagctattgagtgtagaattaatgcagaagatcctaaaaataactttgttccttcaactggaaaaataaattatttatatttacctgtaggtaacttgggtatgagaattgatactgcactttactctggagaaaagataacaccattttatgattcaatgattgcaaaagtaatctcgcatggccatactcgcgtagaagcgatcaatagaatgaagaggttaatgcaagaactggttataaaaggtgttaaaacaaataaagatcttcacttatcaattttgggagattcaagttttttgaaagatacagtaacaactgagtatttagagaaaaactttttaccaatctggaaagagagggagaaaaatgcagctgtatgaaagtgcaacgttaactaagcaacatgtaaaggcgaatattaaagcaaatcaaaaagtacctgatgggatgttaaaaaaatgtcctaagtgtgggaaaatctttctgtctacagaatttgataagtatttttcgtgtcctggttgtaattatggatttaggattggttcatggcaaagggtagcctgggcggttgatgaattttatgaagaggatggttcacgagaactaataacctcagatcctttacattttcctaattatgtaaaaaagattcaaggacttcaaaagactactaaggtaaatgaagcagttttaacgggtaaagctaaaataaaagaccaaatttttgagtgtggcattatggatcctcactttataatgggatcattaggaacaattactggcgaaaagattacgagattatttgaacgtgctacaaaggagaggttgcctgttgtcctatggactgcttcagggggagctagaatgcaagaaggaattatgtcattaatgcagatggcaaaaataagtcaagctatagcacaacatgcatcgaaaggacttttatacattgttattttaactgatccaacaacaggtggagtaacagcaagttttgcaatgcaaggagacattattttagcagagccacatactttagtaggatttgcagggcggcgagttattgagcaaactattcatgagagaatcccagatacgttacaggatgcggagaatgtaataaaacatggattcatagatttaatagtatctcggagtgaagaaaaatctttactttataaattgttaaaatatggtaggtgataataatggcaactgagaatgcaatggcaattgtaaaagctgctcgaagtgataataaaataactgctaaagaaattatagaagaagtattttcagattttattgaattccatggtgatcgtaaaggaacagatgattcagcaattcttggaggattggcaatactttcatctacaccagtaacagtaattgcgactaataggggggaaacagttggtgaacatttgagtacacattttgggtgtccaactccaggtggctatcgtaaagctttgcgtttagcaaagcaggctgcaaagtttaatagaccaattatatttttagtaaatactcctggagcttatccagggaaaacagctgaagaacaagggcaaggatctgcgattgcgcaaaatattatccaaataagtcaacttccagttccaattattactattatttatggtgaaggtggcagtggaggtgcattagcattggcttgcggtgatcaggtgtggatgctagagaatagtacatattcaattttatcacctgagggttttgcctctattttatggaaagatggatcacgtacagaagaagccgcagaattaatgcaaatgaccccaaaagccttgctaagacataaggttattgaaggaataattccagaaagtaaagatcacaaagtaacatgtcgagcaattgctaatattttagataaacagttacaagaattaggaaaactttcagcggtagatttattgattcaacgaaaagaaagatatagaaaattttagttagtatagtaagaggagagaatacattacggtgcacgacttattatcgcttaatagaattaaagaattatataaagagaaagcaatgacaaattgcaactttttttactttaataaagtagattctactcaaaaaatagcaaaatattttttagaccatttaaatatcaataaaccatgtactatttttgctggaagtcaaacgagaggctatggtaaaagaaataggctattttattcaccacaaaattcggggatttatatgagtataattattccacaatacgaaatgcaaaatgaggatattggtttattaacaatttcattagggagtggaatactagaagttttaaagaagtattatcctaaaaaaattttttatttaaaatgggtaaatgatattctattaggcaaggtgaactactcggccataaatgaccgagcttctgggaacacgaagtagtatttaggatattacacaagtattcttgctacctaacttacagaactccgttcttttaccaaggctagttc

SEQ ID NO: 111 - DNA, 1980 bp, Bacillus subtilis
  source 1..1980: mol_type = genomic DNA
atgtttgcaaaacgattcaaaacctctttactgccgttattcgctggatttttattgctgtttcatttggttctggcaggaccggcggctgcgagtgcagaaacggcgaacaaatcgaatgagctaacagcaccgtcgatcaaaagcggaaccattcttcatgcatggaattggtcgttcaatacgttaaaacataatatgaaggatattcatgatgcaggatatacagccattcagacatctccgattaaccaagtaaaggaagggaaccaaggaaataaaagcatgtcgaactggtactggctctatcagccgacatcgtaccaaattggcaaccgttacttaggaactgaacaagaatttaaagaaatgtgtgcagccgctgaagaatatggcataaaggtcattgttgacgcggtcatcaatcataccaccagtgattatgccgcgatttccaatgaggttaagagtattccaaactggacacatggaaacacacaaattaaaaactggtctgatcgatgggatgtcacgcagaattcattgctcgggctgtatgactggaatacacaaaatacacaagtacagtcctatctgaaacggttcttagaaagggctttgaatgacggggcagacggttttcgatttgatgccgccaaacatatagagcttccggatgatgggagttacggcagtcaattttggccgaatatcacaaatacatctgcagagttccaatacggagaaatcctgcaggatagtgcctccagagatgctgcatatgcgaattatatggatgtgacagcgtctaactatgggcattccataaggtccgctttaaagaatcgcaatctgggcgtgtcgaatatctcccactatgcatctgatgtgtctgcggacaagctagtgacatgggtagagtcgcatgatacgtatgccaatgatgatgaagagtcgacatggatgagcgatgatgatatccgtttaggctgggcggtgatagcttctcgttcaggcagtacgcctcttttcttttccagacctgagggaggcggaaatggtgtgagattcccggggaaaagccaaataggtgatcgcgggagtgctttatttgaagatcaggctatcacagcggtcaatagatttcacaatgtgatggctggacagcctgaggagctctcgaatccaaatggaaacaaccagatatttatgaatcagcgcggctcacatggcgttgtgctggcaaatgcaggttcatcctctgtttctatcaatacgccaacaaaattgcctgatggcagatatgacaataaagctggggcaggttcatttcaagtgaatgatggtaaactgacaggcacgatcaatgccaggtctgtggctgtgctttatcctgatgatattgcaaaagcgcctcatgttttccttgagaattacaaaacaggtgtaacacattctttcaatgatcaactgacgattaccttgcgtgcagatgcgaatacaacaaaagccgtttatcaaatcaataatggaccagagacagcgtttaaggatggagatcaattcacaatcggaaaaggagatccatttggcaaaacatacaccatcatgttaaaaggaacgaacagtgatggtgtaacgaggaccgaggaatacagctttgttaaaagagatccagcttcggccaaaaccatcggctatcaaaatccgaatcattggagccaggtaaatgcttatatctataaacatgatgggggcggggcaattgaattgaccggatcttggcctggaaaaccaatgactaaaaatgcagacggaatttacacgctgacgctacctgcggatacggatacaaccaacgccaaagtgatttttaataatggcagcgcccaagtgcctggccagaatcagcctggctttgattacgtgcaaaatggtttatataatgacgcgggcttaagcggttctcttcctcattga
